(19) United States
(12) Patent Application Publication
(10) Pub. No.: US 2022/0378896 A1
(43) Pub. Date: Dec. 1, 2022

(54) VACCINE COMPOSITIONS AND METHODS FOR REDUCING TRANSMISSION OF STREPTOCOCCUS PNEUMONIAE

(71) Applicant: St. Jude Children's Research Hospital, Memphis, TN (US)

(72) Inventors: Jason W. Rosch, Memphis, TN (US); Hannah M. Rowe, Memphis, TN (US)

(73) Assignee: St. Jude Children's Research Hospital, Memphis, TN (US)

(21) Appl. No.: 17/602,414

(22) PCT Filed: Mar. 12, 2020
(86) PCT No.: PCT/IB2020/052250

§ 371 Date: Oct. 8, 2021

Related U.S. Application Data
(60) Provisional application No. 62/817,748, filed on Mar. 13, 2019.

(51) Int. Cl. A61K 39/09; A61P 31/04; C12Q 1/689; C12N 15/10

(52) U.S. Cl. CPC A61K 39/092; A61P 31/04; C12Q 1/689; C12N 15/1058; A61K 2039/55588

(57) ABSTRACT

Compositions and methods are provided for reducing the mammalian transmission of Streptococcus pneumoniae (S. pneumoniae) through the administration to mammalian subjects of vaccine compositions comprising at least one immunogenic polypeptide comprising a S. pneumoniae protein or a fragment or variant thereof that is required for or involved in transmission of the bacteria between mammalian hosts. These vaccine compositions also serve to reduce the incidence rate of at least one invasive disease caused by S. pneumoniae. Methods are also provided for identifying additional genetic factors involved in mammalian transmission of S. pneumoniae.

### FIELD OF THE INVENTION

[0001] The invention relates to the field of immunology and bacteriology. In particular, the invention relates to vaccines for reducing the transmission of Streptococcus pneumoniae (S. pneumoniae). The methods and compositions can be used to treat pneumonia and other invasive diseases associated with S. pneumonia infection.

### REFERENCE TO A SEQUENCE LISTING SUBMITTED ELECTRONICALLY AS A TEXT FILE

[0002] The instant application contains a Sequence Listing which has been submitted in ASCII format via EFS-Web and is hereby incorporated by reference in its entirety. Said ASCII copy, created on Mar. 12, 2020, is named S884351220WO_SeqList_ST25_3-12-20.txt, and is 653 KB in size.

### BACKGROUND OF THE INVENTION

[0003] Introduction of the pneumococcal conjugate vaccine has greatly reduced the burden of invasive disease by Streptococcus pneumoniae (S. pneumoniae), however rates of colonization and pneumonia (McLaughlin et al. (2018) Clin Infect Dis., published online May 24, 2018, DOI: 10.1093/cid/ciy312) remain largely equivalent due to serotype replacement (Azarian et al. (2018) PLoS Pathog. 14(4), e1006966; published online Apr. 5, 2018, DOI: 10.1371/journal.ppat.1006966) and limited efficacy of the vaccine at the mucosal surface. Critical to the success of S. pneumoniae is the capacity of the organism to initially colonize the human nasopharynx and subsequently transmit and colonize a new host. As such, both colonization and transmission dynamics reflect strong evolutionary pressures on this pathogen within populations and are key for understanding epidemiology. Despite the acknowledgement that transmission is a fundamental aspect of pneumococcal biology, there remains limited understanding of the bacterial and host factors that underlie this process when compared to our understanding of invasive disease.

[0004] Streptococcus pneumoniae (the pneumococcus) is a member of the human nasal microbiome, especially of children (van den Bergh (2012) PLoS One. 7(10), e47711, published online Oct. 20, 2012, DOI: 10.1371/journal.pone.0047711). Colonization can progress to invasive diseases such as otitis media, pneumonia, sepsis and meningitis. Pneumococcal transmission can be inferred from studies of human populations, by monitoring nasal colonization dynamics of children (Azarian et al. (2018)). Seasonal patterns of pneumococcal disease and colonization patterns support a role of respiratory viruses in promoting pneumococcal transmission, particularly the Influenza A virus (Althouse et al. (2017) Epidemiol Infect 145:2750-2758; Grijalva et al. (2014) Clin Infect Dis 58:1369-1376). An infant mouse model of pneumococcal transmission has been developed (Kono et al. (2016) PLoS Pathog 12, e1005887; Zafar et al. (2016) Infect Immun. 84(9) 2714-2722; Zafar et al. (2017a) MBio 8, e00989-17; Zafar et al. (2017b) Cell Host Microbe 21:73-83; Zangari et al. (2017) MBio. 8(2), published online Mar. 16, 2017, DOI: 10.1128/mBio.00188-17) and has shown valuable insights into the importance of capsule type (Zafar et al. (2017a)) and the contribution of pneumolysin (Zafar et al. (2017b)) for transmission but are not ideal for large scale genetic screens, as only a single bacteria is transmitted from donor to contact pup (Kono et al. (2016)). The present invention provides a model that is able to overcome these population bottlenecks to provide insight into factors required for mammalian transmission of S. pneumoniae.

### SUMMARY OF THE INVENTION

[0005] Compositions and methods are provided for reducing the mammalian transmission of Streptococcus pneumoniae (S. pneumoniae) through the administration to mammalian subjects of vaccine compositions comprising at least one immunogenic polypeptide comprising a S. pneumoniae protein or a fragment thereof that is required for or involved in transmission between mammalian hosts. Additional methods for reducing the mammalian transmissibility of S. pneumoniae comprise increasing levels or activity of proteins that decrease tolerance of desiccation stress or reducing levels or activity of proteins required for or involved in successful transmission. Thus, methods are provided for reducing the incidence rate of at least one invasive disease caused by S. pneumoniae, such as acute otitis media, pneumonia, sepsis, bacteremia, and meningitis.

[0006] Methods are also provided for identifying genetic factors involved in mammalian transmission of S. pneumoniae, wherein the methods comprise infecting an influenza co-infected ferret with a ferret-transmissible strain of S. pneumoniae comprising a gene mutant library, and analyzing members of the gene mutant library that are able to colonize, but exhibit a reduced transmission rate to contact ferrets.

### BRIEF DESCRIPTION OF THE FIGURES

[0007] FIG. 1 depicts pneumococcal transmission in ferrets. FIG. 1A shows the bacterial burden in ketamine-induced sneezes from donor and contact ferrets by days post-infection of donor animals. Each dot represents a single animal. In some iterations of the experiment, animals were sneezed daily, and in others, they were sneezed every other day. FIG. 1B shows donor-to-contact bottlenecks: percentage of inserts recovered from donor also recovered from cagemate contact. FIG. 1C shows the percent donor-to-contact bottleneck depending on the number of inserts in donor. FIG. 1D shows the percent donor-to-contact bottleneck depending on the bacterial burden (CFU) in donor.

[0008] FIG. 2 shows the fitness landscape of S. pneumoniae genes during mammalian transmission. Transposon insertions displaying reduced transmission in the ferret model as determined by absence in recipient animals while present in 5 or greater of 9 donor animals indicating not a colonization defect or enhanced transmission (pyruvate metabolism genes) as determined by recovery from all 21 recipient animals without being over-represented in donor animals. Gene designations for both BHN97 and TIGR4 are indicated. Predicted gene functionality is indicated by functional grouping. Genes with a homolog in either TIGR4 or D39 model strains are indicated by a solid border and genes without homology in either TIGR4 or D39 are indicated by a dotted border.

[0009] FIG. 3 shows that metabolic factors for transmission enhance environmental stability. FIG. 3A shows the confirmation of hyper-transmissibility of a targeted deletion of hyper transmitter spxB (SP_0730) in infant mice. Infant mice, when 4 days old, one half of each litter was infected intranasally with 2000 CFU of wild type or mutant pneumococcus. Pups were sampled daily for colonization by taping the nares on an agar plate with days until contact pups are colonized defined as two consecutive positive samples. Each panel represents data from between at least 10-20 contact pups were sampled per strain, from at least four independent litters. FIG. 3B shows the complementation of SpxB deletion on transmissibility. FIG. 3C provides the bacterial burden in nasal passages of donor pups 10 days post challenge. FIG. 3D shows the percent bacterial survival following desiccation and 24 hours incubation at room temperature compared to CFU/mL prior to desiccation. As deletion of SpxB in a serotype 4 strain eliminates capsule expression, a strain where a secondary mutation restores capsule expression was also examined for the TIGR4 strain (SpxB capsule+). FIG. 3E provides percent bacterial survival of SpxB complemented strain following desiccation and 24 hours incubation at room temperature compared to CFU/mL prior to desiccation. FIG. 3F shows the percent bacterial survival 24 hours post desiccation following two hour growth in carbohydrate free CY media. FIG. 3G provides the percent bacterial survival 24 hours post desiccation following two hour growth in metal depleted media. Statistics calculated by Mantel-Cox log-rank for transmission and for percent survival comparisons, Mann-Whitney test was used. A P-value <0.05 considered significant (*) with the respective P-values indicated for each panel.

[0010] FIG. 4 shows the confirmation in infant mice of genes required for mammalian transmission predicted by the ferret screen. C57/B16 mice were mated and one half of each litter of pups when 4 days old were infected intranasally with 2000 CFU wild type or mutant or complemented pneumococcal strain. FIG. 4A depicts the results for the targeted cppA (SP_1449) deletion. FIG. 4B depicts the results for the targeted comD (SP_2236) deletion. FIG. 4C depicts the results for the targeted piaA (SP_1032) deletion. Pups were sampled daily for colonization by taping the nares on an agar plate colonization of contact pups defined as two consecutive positive samples. Each panel represents data from between 10-20 contact pups that were sampled per strain, from at least 4 independent litters. FIG. 4D provides the bacterial burden in nasal passages of donors 10 days post challenge. For transmission, statistics were calculated by Mantel-Cox log-rank test and bacterial burden compared by Mann-Whitney using Prism 6. A P-value <0.05 was considered significant (*) with the respective P-values indicated for each comparison indicated in the respective panels, n.s.=non-significant.

[0011] FIG. 5 shows the purification of recombinant CppA (A) and recombinant PiaA (B). Western blots are provided with sera from immunized mice against cell fractions (C, D, E) and purified proteins (F, G, H) using sera from alum vaccinated (C, F), rCppA vaccinated (D, G), and rPiaA vaccinated (E, H) animals. ELISA results are provided against whole cell lysates (PCV-13) (I) or purified proteins (J), reported as log titer, inverse of last serum dilution with reading above background.

[0012] FIG. 6 shows that maternal vaccination with transmission factors blocks pneumococcal transmission in non-vaccinated offspring. Dams were vaccinated 2 weeks prior to mating, and every subsequent two weeks with recombinant protein vaccines based on transmission factors PiaA and CppA or 1:50 human dose PCV-13, and alum controls. One half of each litter was infected intranasally with 2000 CFU pneumococcal strain BHN97. FIG. 5A depicts bacterial burden in donor nasal passages 10 days post infection. FIGS. 5B-5E depict days until contact pups become colonized (two consecutive positive samples). FIG. 6B shows dam vaccinated with rPiaA, FIG. 6C shows dam vaccinated with rCppA, FIG. 6D shows dam vaccinated with both rCppA and rPiaA, and FIG. 6E shows dam vaccinated with PCV-13. FIG. 6F shows cross fostering, days until contact pups become colonized, placental=dam vaccinated with rCppA, foster dam unvaccinated. Lactation=dam unvaccinated, foster dam vaccinated with rCppA. For transmission, statistics were calculated by Mantel-Cox log-rank test and bacterial burden compared by Mann-Whitney using Prism 6. A P-value <0.05 was considered significant (*) with the respective P-values indicated for each comparison indicated in the respective panels, n.s.=non-significant.

### DETAILED DESCRIPTION OF THE INVENTION

[0013] The present inventions now will be described more fully hereinafter with reference to the accompanying drawings, in which some, but not all embodiments of the inventions are shown. Indeed, these inventions may be embodied in many different forms and should not be construed as limited to the embodiments set forth herein; rather, these embodiments are provided so that this disclosure will satisfy applicable legal requirements. Like numbers refer to like elements throughout.

[0014] Many modifications and other embodiments of the inventions set forth herein will come to mind to one skilled in the art to which these inventions pertain having the benefit of the teachings presented in the foregoing descriptions and the associated drawings. Therefore, it is to be understood that the inventions are not to be limited to the specific embodiments disclosed and that modifications and other embodiments are intended to be included within the scope of the appended claims. Although specific terms are employed herein, they are used in a generic and descriptive sense only and not for purposes of limitation.

### 1. Overview

[0015] Described herein is the first genetic screen for those factors involved in transmission of S. pneumoniae between mammalian hosts. Targeting one or more of these transmission factors with vaccines can be used to block pathogen spread in populations and reduce or eliminate invasive disease caused by S. pneumoniae in whole populations. Compositions and methods are provided herein for reducing the mammalian transmission of S. pneumoniae and/or reducing the incidence rate of at least one invasive disease caused by S. pneumonia (such as acute otitis media, pneumonia, sepsis, bacteremia, and meningitis) by administering to a mammalian subject infected with S. pneumoniae or at risk of infection by S. pneumoniae a vaccine composition comprising at least one immunogenic polypeptide comprising a S. pneumoniae protein (or an immunogenic fragment or variant thereof) that is required for or involved in transmission between mammalian hosts. Alternatively, methods are provided for reducing the levels or activity of one or more proteins required for or involved in transmission in order to reduce the mammalian transmissibility of S. pneumoniae and/or reducing the incidence rate of at least one invasive disease caused by S. pneumonia.

[0016] As described herein, when the expression of particular S. pneumoniae genes is reduced, the fitness of S. pneumoniae is enhanced and the bacteria are less prone to desiccation stress. Thus, additional methods for reducing the mammalian transmissibility of S. pneumoniae and/or reducing the incidence rate of at least one invasive disease caused by S. pneumoniae comprise increasing the levels or activity of proteins that decrease tolerance of desiccation stress.

[0017] Methods are also provided for identifying additional genetic factors involved in mammalian transmission of S. pneumoniae, wherein the methods comprise infecting an influenza co-infected ferret with a ferret-transmissible strain of S. pneumoniae comprising a gene mutant library, and analyzing members of the gene mutant library that are able to colonize, but exhibit a reduced transmission rate to contact ferrets.

2. Factors Involved in Mammalian Transmission of S. pneumoniae

[0018] A genetic screen in a ferret model of S. pneumoniae infection and transmission uncovered factors required for or involved in mammalian transmission of the bacteria. Specifically, Table 1 provides S. pneumoniae proteins (SEQ ID NOs: 1-87) that when genes encoding these proteins are disrupted or deleted, these bacteria were unable to transmit to recipient animals. Thus, these genes and encoded proteins are required for mammalian transmission of S. pneumoniae. An additional 118 S. pneumoniae proteins are provided in Table 2 (SEQ ID NOs: 88-205) that when genes encoding these proteins are disrupted or deleted, these bacteria exhibited a significantly reduced transmission rate to recipient animals. These genes and encoded proteins are required for normal or optimal levels of transmission of S. pneumoniae.

TABLE 1

| | | | Mean | Number | | | Identified | | |
|---|---|---|---|---|---|---|---|---|---|
| SEQ | BHN97 | TIGR4 | Probability | of | | | in Murine | | |
| ID | Locus | Locus | of | Donors | Functional | | Nasopharynx | | |
| NO: | ID | ID | Infection | Infected | Classification | Name | TnSeq* | KEGG prediction** | BHN97 protein sequence |
| 1 | peg.0181 | n/a | 0 | 8 | translation | | | Is required not only | MSIFIGGAWPYANGSLHIGHAAALLPGDILARYYR |
| | | | | | | | | for elongation of | QKGEEVLYVSGSDCNGTPISIRAKKENKSVKEIADF |
| | | | | | | | | protein synthesis but | YHKEFKETFEKLGFTYDLYSRTDSPLHHEIVQELFL |
| | | | | | | | | also for the initiation | QLYEKKFLYTKKIKQLYCTFDNQFLPDRFVEGKCP |
| | | | | | | | | of all mRNA | NCGTHSRGDQCDNCSAILDPIDLVDKRCSICSNEPE |
| | | | | | | | | translation through | VRETEHFYYVFSEFQNLLETYLNDAEETVRWRKN |
| | | | | | | | | initiator tRNA(fMet) | AINLTKRYLREGLPDRAVTRDLPNGIPVPIDGFRDK |
| | | | | | | | | aminoacylation (By | KIYVWFEAVAGYYTASVDWAQKLQNNITDFWNN |
| | | | | | | | | similarity) | RTKSYYVHGKDNIPFHTIIWPAILSGLEIEPLPEYIIS |
| | | | | | | | | | SEYLTLENKKISTSNNWAIWLNDIIKKYDADSIRYF |
| | | | | | | | | | LTINAPEMKDANFSWREFIYSHNSELLGSYGNFINR |
| | | | | | | | | | TLKFIEKYFESEIPTKYLEGEILYNLKELYTTVGNLV |
| | | | | | | | | | ESGHMKQALEEIFEYIRSANKFYDDMKPWALRESD |
| | | | | | | | | | IEKCKEVLATCVIIILNLGQMLNPFIPFSGKKIEDMF |
| | | | | | | | | | KTKLNTWNYISNLPNKLSDVSMLFDRIDLKKIDEE |
| | | | | | | | | | VLELQQTSSR |
| 2 | peg.1585 | SP_0252 | 0 | 8 | CHO | | | Transaldolase is | MEFMLDTLNLDEIKKWSEILPLAGVTSNPTIAKREG |
| | | | | | metabolism | | | important for the | SINFFERIKDVRELIGSTPSIHVQVISQDFEGILKDAH |
| | | | | | | | | balance of | EIRRQAGDDIFIKVPVTPAGLRAIKVLKKEGYHITA |
| | | | | | | | | metabolites in the | TAIYTVIQGLLAIEAGADYLAPYYNRMENLNIDSNS |
| | | | | | | | | pentose-phosphate | VIRQLALAIDRQNSPSKILAASFKNVAQVNNALAA |
| | | | | | | | | pathway (By | GAHAVTAGADVFESAFAMPSIQKAVDDFSDDWFV |
| | | | | | | | | similarity) | TQNSRSI |
| 3 | peg.0031 | SP0913 | 0 | 7 | bacteriocin | | | ABC transporter, | MFRLTNKLAVSNLIKNRKLYYPFALAVLLAVTVTY |
| | | | | | | | | permease | LFYSLTFNPKIAEIRGGTTIQATLGFGMFVVTLASAI |
| | | | | | | | | | IVLYANSFVMKNRSKELGIYGMLGLEKRHLISMTF |
| | | | | | | | | | KELVVFGILTVGAGIGIGALFDKLIFAFLLKLMKLK |
| | | | | | | | | | VELVATFQMNVVIAVLVVFGLIFLGLMFLNALRIA |
| | | | | | | | | | RMNALQLSREKASGEKRGRFLPLQTILGSISLGIGY |
| | | | | | | | | | YLALTVTDPLTALTTFFLAVLLVIFGTYLLFNAGIT |
| | | | | | | | | | VFLQILKKNKKYYYQPNNLISVSNLIFRMKKNAVG |
| | | | | | | | | | LATIAILSTMVLVTMSAATSIFNSAESFKKVLNPHD |
| | | | | | | | | | FGVSVQNVEKEDLDKLLSQFASDKGYSVKEKEVL |
| | | | | | | | | | RYSNFGIANQEGTKLTIFEKGQNRVQPTTVFMVFD |
| | | | | | | | | | QKDYENMTGQKLSLSGNEVGLFAKNDGLKGQKA |
| | | | | | | | | | LTLNDHQFSVKEEFNKDFIVNHVPNKFNILTTDYN |
| | | | | | | | | | YLVVPDLQAFLDQFPDSAIYNQFYGGMNVNVSEE |
| | | | | | | | | | EQLKVAEEYENYLNQFNAQLDTEGSYVYGSNLAD |
| | | | | | | | | | ASSQMSALFGGVFFIGIFLSIIFMVGTVLVIYYKQIS |
| | | | | | | | | | EGYEDRERFIILQKVGLDQKQIKQTINKQVLTVFFL |
| | | | | | | | | | PLLFAFIHLAFAYHMLSLILKVIGVLDTTMMLIVTL |
| | | | | | | | | | SICAIFLIAYVLIFMITSRSYRKIVQM |
| 4 | peg.0182 | n/a | 0 | 7 | signaling | | | protein tyrosine | LNNLTLLKEYNFRDLGNHLTQTGQKIKPKTLFRSS |
| | | | | | | | | serine phosphatase | KLFGISKIDVDLLQSYGITKVIDFRSANEIKKAPDPD |
| | | | | | | | | | IKNIKNIVIPIFYNDDSELTEFPIEFFNKSDAGFQHMI |
| | | | | | | | | | KTYDQMINQKQSKLGYKKFFKLLLSHPKDESLLFH |
| | | | | | | | | | CSMGKDRTGIASLFLLYILGVDMNDIFHDYLLSNK |
| | | | | | | | | | YLINVRKENIEYVNNHSGNVILMHNLLSLSSAKEE |
| | | | | | | | | | YINRVLNVLDKEYGGILRYINTELGISSQEIEELKDR |
| | | | | | | | | | YLF |
| 5 | peg.0843 | n/a | 0 | 7 | phage | | | NA | MAKAITDATFEQETKDGLVLVDFWATWCGPCRM |
| | | | | | | | | | QGPILDKLSEELSEDVLKIVKMDVDENPNTARAFGI |
| | | | | | | | | | MSIPTLLFKKDGQVVKQVAGVHTAEQIKAIIAELS |
| 6 | peg.1235 | SP2146 | 0 | 7 | CHO | | | Alpha-L-fucosidase | MKKIKPHGPLPSQTQLAYLGDELAAFIHFGPNTFY |
| | | | | | metabolism | | | | DQEWGTGQEDPERFNPSQLDAREWVRVLKETGFK |
| | | | | | | | | | KLILVVKHHDGFVLYPTAHTDYSVKVSPWRRGKG |
| | | | | | | | | | DLLLEVSQAATEFDMDMGVYLSPWDAHSPLYHV |
| | | | | | | | | | DREADYNAYYLAQLKEILSNPNYGNAGKFAEVW |
| | | | | | | | | | MDGARGEGAQKVNYEFEKWFETIRDLQGACLIFST |
| | | | | | | | | | EGTSIRWIGNERGYAGDPLWQKVNPDKLGTEAEL |
| | | | | | | | | | NYLQHGDPSGTIFSIGEADVSIRPGWFYHEDQDPKS |
| | | | | | | | | | LEELVEIYFHSVGRGTPLLLNIPPNQAGLFDAKDIE |
| | | | | | | | | | RLYEFATYRNELYKEDLALGAEVSGPALSADFACR |
| | | | | | | | | | HLTDGLETSSWANDAALPIQLELDLGSPKTFDVIEL |
| | | | | | | | | | REDLKLGQRIAAFHVQVEVDGVWQEFGSGHTVGY |
| | | | | | | | | | KRLLRGAVVEAQKIRVVITESQVLPLLTKISLYKTP |
| | | | | | | | | | RLSQTVAVQGLAFAEKSLAVAKGETLHFRIERSESS |
| | | | | | | | | | SSLEAKISIQPGTGVHGVAYQDEIYVLAFQAGETEK |
| | | | | | | | | | SLTLPTLYFAGDKTLDFYLNLTVDGQLVDQLQVQ |
| | | | | | | | | | VS |
| 7 | peg.1239 | SP2152 | 0 | 7 | transport | | | c4-dicarboxylate | MSEKAKKGFKMPSSYTVLLIIIAIMAVLTWFIPAGA |
| | | | | | | | | anaerobic carrier | FIEGIYETQPQNPQGIWDVLMAPIRAMLGTHPEEGS |
| | | | | | | | | | LIKETSAAIDVAFFILMVGGFLGIVNKTGALDVGIA |
| | | | | | | | | | SIVKKYKGREKMLILVLMPLFALGGTTYGMGEET |
| | | | | | | | | | MAFYPLLVPVMMAVGFDSLTGVAIILLGSQIGCLA |
| | | | | | | | | | STLNPFATGIASATAGVGTGDGIVLRLIFWVTLTAL |
| | | | | | | | | | STWFVYRYADKIQKDPTKSLVYSTRKEDLKHFNV |
| | | | | | | | | | EESSSVESTLSSKQKSVLFLFVLTFILMVLSFIPWTD |
| | | | | | | | | | LGVTIFDDFNAWLTGLPVIGNIVGSSTSALGTWYFP |
| | | | | | | | | | EGAMLFAFMGILIGVIYGLKEDKIISSFMNGAADLL |
| | | | | | | | | | SVALIVAIARGIQVIMNDGMITDTILNWGKEGLSGL |
| | | | | | | | | | SSQVFIVVTYIFYLPMSFLIPSSSGLASATMGIMAPL |
| | | | | | | | | | GEFVNVRPSLIITAYQSASGVLNLIAPTSGIVMGAL |
| | | | | | | | | | ALGRINIGTWWKFMGKLVVAIIVVTIALLLLGTFLP |
| | | | | | | | | | FL |
| 8 | peg.1635 | n/a | 0 | 7 | regulation | | | | MYHIKADKRSLASARLISQGLNRLLQAKDFDSITV |
| | | | | | | | | | TDIVNEAGVGRATFYRLFDNVTDVITYSYYIIAHPT |
| | | | | | | | | | LEKIQNKFISNILDFSKSLINDFYSQDSILLISTLLFSV |
| | | | | | | | | | QNGYHFLSMLNLYKNDLLVLLKNEKNLKTKSQDY |
| | | | | | | | | | KYLMEIYLMTLMVTVGSYIQKPEITRELLLEKVSN |
| | | | | | | | | | VWQDLTHLHINN |
| 9 | peg.1750 | SP0397 | 0 | 7 | CHO | | | mannitol-1-phosphate | MKHSVHFGAGNIGRGFIGEILFKNGFHIDFVDVNN |
| | | | | | metabolism | | | 5-dehydrogenase | QIIHALNEKGKYEIEIAQKGQSRIEVTNVAGINSKEH |
| | | | | | | | | | PEQVIEAIQKTDIITTAIGPNILPFIAELLAKGIEARRV |
| | | | | | | | | | AGNTQVLDVMACENMIGGSQFLYQEVKKYLSPEG |
| | | | | | | | | | LTFADNYIGFPNAAVDRIVPAQSHEDSLFVVVEPFN |
| | | | | | | | | | EWVVETKRLKNPDLRLKDVHYEEDLEPFIERKLFS |
| | | | | | | | | | VNSGHATSAYIGAHYGAKTILEALQNPNIKSRIESV |
| | | | | | | | | | LAEIRSLLIAKWNFDKKELENYHKVIIERFENPFIVD |
| | | | | | | | | | EVSRVARTPIRKLGYNERFIRPIRELKELSLSYKNLL |
| | | | | | | | | | KTVGYAFDYRDVNDEESIRLGELLAKQSVKDVVIQ |
| | | | | | | | | | VTGLDDQELIEQIVEYI |
| 10 | peg.0148 | SP1032 | 0 | 6 | Metal | PiaA | | Periplasmic binding | MKNKFFLIAILAMCIVFSACSSNSVKNEENTSKEHA |
| | | | | | transport | | | protein | PDKIVLDHAFGQTILDKKPERVATIAWGNHDVALA |
| | | | | | | | | | LGIVPVGFSKANYGVSADKGVLPWTEEKIKELNGK |
| | | | | | | | | | ANLFDDLDGLNFEAISNSKPDVILAGYSGITKEDYD |
| | | | | | | | | | TLSKIAPVAAYKSKPWQTLWRDMIKIDSKALGME |
| | | | | | | | | | KEGDELIKNTEARISKELEKHPEIKGKIKGKKVLFT |
| | | | | | | | | | MINAADTSKFWIYTSKDPRANYLTDLGLVFPESLK |
| | | | | | | | | | EFESEDSFAKEISAEEANKINDADVIITYGDDKTLE |
| | | | | | | | | | ALQKDPLLGKINAIKNGAVAVIPDNTPLAASCTPTP |
| | | | | | | | | | LSINYTIEEYLNLLGNACKNAK |
| 11 | peg.0152 | SP1035 | 0 | 6 | Metal | PiaD | | ABC transporter | MKGLWSNNLTCGYDEKIILENINIKIPEEKISVIIGSN |
| | | | | | transport | | | | GCGKSTLIKTLSRLIKPLEGEVLLDNKSINSYKEKD |
| | | | | | | | | | LAKHIAILPQSPIIPESITVADLVSRGRFPYRKPFKSL |
| | | | | | | | | | GKDDLEIINRSMVKANVEDLANNLVEELSGGQRQ |
| | | | | | | | | | RVWIALALAQDTSILLLDEPTTYLDISYQIELLDLLT |
| | | | | | | | | | DLNQKYKTTICMILHDINLTARYADYLFAIKEGKL |
| | | | | | | | | | VAEGKPEDILNDKLVKDIFNLEAKIIRDPISNSPLMI |
| | | | | | | | | | PIGKHHVNS |
| 12 | peg.0159 | SP1040 | 0 | 6 | recombination | | | Resolvase | MKAFAIYNDYEIVGEYEDAGKSGKSIEGRIQFNRM |
| | | | | | | | | | MEDIKSGKDGVSFVLVFKLSRFARNAADVLSTLQI |
| | | | | | | | | | MQDYGVNLICVEDGIDSSKDAGKLMISVLSAVAEI |
| | | | | | | | | | ERENIRIQTMEGCIQKAREGKWNGGFAPYGYKLED |
| | | | | | | | | | GKLFINEEEAVAIRTIFDQYVNTTIGANGISKYLENH |
| | | | | | | | | | GIRKIPRQNGKNPLFDAGLIRKILKNPVYHGKIAFG |
| | | | | | | | | | RRTLEKVHGTRNEYKQVEQDEYLISEGIHEAIVSDE |
| | | | | | | | | | VWQAAQVKLKSQAKKYEHVNKGKDTRTHLLSGI |
| | | | | | | | | | VKCPICGVGMFGNKCIKKKKDGTKYKDFYYYGCK |
| | | | | | | | | | HRQMIRGHKCTFSKQIREELLDDAVAEVIVKIVSNP |
| | | | | | | | | | KFASMMQEKINMKVDTSEIEKEIDNYQKELRKSHS |
| | | | | | | | | | TKFKLIEEIDNLDVEDKHYKRRKQDLDDRLYRMY |
| | | | | | | | | | DKIDELESSLIDAKAKKQTIEAEKLTGDNIYKVLIYF |
| | | | | | | | | | DKLYKVMNDVERRQLISALISEIQVYEEKQSNGQW |
| | | | | | | | | | LKSITFKLPIIEENLNIDLDNDEQVECVSLLEKRS |
| 13 | peg. 0186 | SP0638 | 0 | 6 | transport | | Yes | ABC transporter, | MKKYQRMHLIFIRQYLKQIMEYKADFLVGVVGVF |
| | | | | | | | | permease | LTQGLNMLFLNILFQHIPLLDGWSFHQVAFIYGFSL |
| | | | | | | | | | IPKGIDHLFFDNLWALGQHLIRKGEFDKYLTRPISP |
| | | | | | | | | | LFHILVETFQIDALGELLVGVLLLLMTITSLTWTWA |
| | | | | | | | | | KVFLFLISIPFATLIYTSLKIVTASIAFWTKQSGAIIYI |
| | | | | | | | | | FYMFNDFAKYPIAIYHSFLRWLISFIIPFAFTAYYPA |
| | | | | | | | | | SYFLKDKDGLFNIGGLILISLIFFTLSLKLWNKGLDA |
| | | | | | | | | | YESAGS |
| 14 | peg.0256 | SP1125 | 0 | 6 | CHO | | Yes | Glycerate kinase | MKIVIAPDSFKESLTAQQVAEAIKRGFQQSIADVEY |
| | | | | | metabolism | | | | LLCPVGDGGEGTVDAIRHSLDLKEKWIQVTDPFGQ |
| | | | | | | | | | KEAMCYFQKGELALFEVADLVGLGKIPLEKRNPLQ |
| | | | | | | | | | IQTCGIGELILHLISKGIKDIYIGVGSTASNDGGLGIA |
| | | | | | | | | | AGLGYQFYDRDGNVLPASSQSLLNLASVSTENCY |
| | | | | | | | | | KIPEGVQIHILADVVSPLCGHQGATYTFGNQKGLH |
| | | | | | | | | | PTMFAVVDQAIQDFYEKFSPATLEIKGAGAGGGLA |
| | | | | | | | | | GGLCAFAQASIVSGIDTLLGLNQL |
| 15 | peg.0384 | SP_1275 | 0 | 6 | CHO | | | carbamoyl-phosphate | MPKRTDIQKIMVIGSGPIIIGQAAEFDYAGTQACLS |
| | | | | | metabolism | | | synthetase ammonia | LKEEGYEVVLVNSNPATIMTDKEIADKVYIEPITLE |
| | | | | | | | | chain | FVTRILRKEGPDALLPTLGGQTGLNMAMELSKNGI |
| | | | | | | | | | LDELGVELLGTKLSAIDQAEDRDLFKQLMEELEQPI |
| | | | | | | | | | PESEIVNTVEEAVAFAATIGYPVIVRPAFTLGGTGG |
| | | | | | | | | | GMCANEKELREITENGLKLSPVTQCLIERSIAGFKEI |
| | | | | | | | | | EYEVMRDSADNALVVCNMENFDPVGIHTGDSIVF |
| | | | | | | | | | APAQTMSDYENQMLRDASLSIIRALKIEGGCNVQL |
| | | | | | | | | | ALDPNSFKYYVIEVNPRVSRSSALASKATGYPIAKL |
| | | | | | | | | | AAKIAVGLTLDEVINPVTGSTYAMFEPALDYVVAK |
| | | | | | | | | | IPRFPFDKFEKGERRLGTQMKATGEVMAIGRNIEES |
| | | | | | | | | | LLKACRSLEIGVHHNEIPELAAVSDDTLIEKVVKAQ |
| | | | | | | | | | DDRLFYVSEAIRRGYTPEEIAELTKIDIFYLDKLLHI |
| | | | | | | | | | FEIEQELGAHPQDLEVLKTAKLNGFSDRKIAELWG |
| | | | | | | | | | TTDDKVRQLRLENKIVPVYKMVDTCAAEFDSETP |
| | | | | | | | | | YFYSTYGWENESIKSDKESVLVLGSGPIRIGQGVEF |
| | | | | | | | | | DYATVHSVKAIQAAGYEAIIMNSNPETVSTDFSVS |
| | | | | | | | | | DKLYFEPLTFEDVMNVIDLEQPKGVIVQFGGQTAI |
| | | | | | | | | | NLAEPLAKAGVTILGTQVADLDRAEDRDLFEQALK |
| | | | | | | | | | ELDIPQPPGQTATNEEEAALAARKIGFPVLVRPSYV |
| | | | | | | | | | LGGRAMEIVENEEDLRSYMRTAVKASPDHPVLVD |
| | | | | | | | | | SYIVGQECEVDAISDGKNVLIPGIMEHIERAGVHSG |
| | | | | | | | | | DSMAVYPPQTLSQKVQETIADYTKRLAIGLHCLGM |
| | | | | | | | | | MNIQFVIKDEKVYVIEVNPRASRTVPFLSKVTNIPM |
| | | | | | | | | | AQVATKLILGQSLSELGYQNGLYPESTRVHIKAPVF |
| | | | | | | | | | SFTKLAKVDSLLGPEMKSTGEVMGSDATLEKALY |
| | | | | | | | | | KAFEASYLHLPTFGNVVFTIADDAKEEALNLARRF |
| | | | | | | | | | QNIGYGILATEGTAAFFASHGLQAQPVGKIGDDDK |
| | | | | | | | | | DIPSFVRKGRIQAIINTVGTKRTADEDGEQIRRSAIE |
| | | | | | | | | | HGVPLFTALDTANAMLKVLESRSFVTEAI |
| 16 | peg.0386 | SP_1277 | 0 | 6 | Amino acid | | Yes | aspartate | MSENQQALNHVVSMEDLTVDQVMKLIKRGIEFKN |
| | | | | | metabolism | | | transcarbamylase | GAQLPYEDHPIVSNLFFEDSTRTHKSFEVAEIKLGL |
| | | | | | | | | | ERLDFDVKTSSVNKGETLYDTILTLSALGVDVCVIR |
| | | | | | | | | | HPEVDYYRELIASPTITTSIINGGDGSGQHPSQSLLD |
| | | | | | | | | | LMTIYEEFGHFEGLKVAIAGDLDHSRVAKSNMQIL |
| | | | | | | | | | KRLGSELFFAGPEEWRSQEFADYGQFVTIDEIIDQV |
| | | | | | | | | | DVMMFLRVQHERHDSGAVFSKEDYHAQHGLTQE |
| | | | | | | | | | RYDRLKETAILMHPAPINRDVEIADHLVEAPKSRIV |
| | | | | | | | | | QQMTNGVFVRMAILESVLASRNAN |
| 17 | peg.0483 | SP1391 | 0 | 6 | Protein | | Yes | Putative membrane | MTIHIIITMLLLLAFLIGSIWFAKKKYQINLAVLGLG |
| | | | | | processing | | | peptidase family | AVAFFVSSQILEKLVHILILHPQKDGSIALLQDHPLI |
| | | | | | | | | (DUF2324) | YIIYGLAMAAFFEETARLVFFKWLEKKRSLEKADA |
| | | | | | | | | | LAYGLGHGGLELIFLGLTSLLNLYIVLSAVQTQNPQ |
| | | | | | | | | | VMQLLSENMLKTIQSLSVWQIYLLGFERILALGFQL |
| | | | | | | | | | LLTVWVYQAVRQKKWIYLLAAYGLHAFFDLAPSL |
| | | | | | | | | | FQVGWLTNPVLVEVILALELVLVAYGTKEIFCKKS |
| 18 | peg.0730 | SP1654 | 0 | 6 | CHO | | Yes | Alpha-L-fucosidase | MIRNKKQDYVLAYKQPASTTYMSWEEEALPIGNG |
| | | | | | metabolism | | | | SLGAKVFGLIGAERIQFNEKSLWSGGPLPDSSDYQ |
| | | | | | | | | | GGNLQDQYVFLAEIRQALEKRDYNLAKELAEQHLI |
| | | | | | | | | | GPKTSQYGTYLSFGDIHIEFSQQGTTLSQVTDYQRQ |
| | | | | | | | | | LNISKALVTTSYVYKGTRFEREAFASFPDDLLVQRF |
| | | | | | | | | | TKEGAETLDFTIELSLTCDLASDEKYEQEKSDYKEC |
| | | | | | | | | | KLDITD SHILMKGRVKDNDLRFASYLAWETDGDIR |
| | | | | | | | | | VWSDRVQISGASYANLFLAAKTDFAQNPASNYRK |
| | | | | | | | | | KLDLEQQVIDLVDTAKEKGYTQLKSRHIEDYQALF |
| | | | | | | | | | QRVQLDLEADVDASTTDDLLKNYKPQEGQALEEL |
| | | | | | | | | | FFQYGRYLLISSSRDCPDALPANLQGVWNAVDNPP |
| | | | | | | | | | WNSDYHLNVNLQMNYWPAYVTNLLEAVFPVINY |
| | | | | | | | | | VDDLRVYGRLAAVKYAGIVSQKGEENGWLVHTQ |
| | | | | | | | | | ATPFGWTAPGWDYYWGWSPAANAWMMQTVYE |
| | | | | | | | | | AYSFYRDQDYLREKIYPMLRETVRFWNAFLHKDQ |
| | | | | | | | | | QAQRWVSSPSYSPEHGPISIGNTYDQSLIWQLFHDF |
| | | | | | | | | | IQAAQELGLDEDLLTEVKEKSDLLNPLQITQSGRIR |
| | | | | | | | | | EWYEEEEQYFQNEKVEAQHRHASHLVGLYSGNLF |
| | | | | | | | | | SYKGQEYIEAARASLNDRGDGGTGWSKANKINLW |
| | | | | | | | | | ARLGDGNRAHKLLAEQLKTSTLPNLWCSHPPFQID |
| | | | | | | | | | GNFGATSGMAEMLLQSHAAYLVPLAALPDAWST |
| | | | | | | | | | GSVSGLMARGHFEVSMSWEDKKLLQLTILSRSGG |
| | | | | | | | | | DLRVSYPDIEKSVIKMNQEKIKAKCMGKDCISVAT |
| | | | | | | | | | AEGDLVQFYF |
| 19 | peg.0904 | SP1840 | 0 | 6 | transport | | | ABC transporter | MQNKQEQWAVLKRLMSYLKPYGLLTFLALSFLLA |
| | | | | | | | | | TTVIKSVIPLVASHFIDQYLSNLNQLAVTVLLVYYG |
| | | | | | | | | | LYILQTVVQYVGNLLFARVSYSIVRDIRRDAFANM |
| | | | | | | | | | EKLGMSYFDKTPAGSIVSRLTNDTETISDMFSGILSS |
| | | | | | | | | | FISAVFIFLTTLYTMLVLDFRLTALVLLFLPLIFLLV |
| | | | | | | | | | NLYRKKSVKIIEKTRSLLSDINSKLAENIEGIRIIQAF |
| | | | | | | | | | NQEKRLQAEFDEINQEHLVYANRSVALDALFLRPA |
| | | | | | | | | | MSLLKLLGYAVLMAYFGYRGFSIGITVGTMYAFIQ |
| | | | | | | | | | YINRLFDPLIEVTQNFSTLQTAMVSAGRVFALIDER |
| | | | | | | | | | TYEPLQENGQAKVQEGNIRFEHVCFSYDGKHPILD |
| | | | | | | | | | DISFSVNKGETIAFVGHTGSGKSSIINVLMRFYEFQS |
| | | | | | | | | | GRVLLDDVDIRDFSQEELRKNIGLVLQEPFLYHGTI |
| | | | | | | | | | KSNIAMYQEISDDQVQAAAAFVDADSFIQELPQGY |
| | | | | | | | | | DSPVSERGSSFSTGQRQLLAFARTVASQPKILILDE |
| | | | | | | | | | ATANIDSETESLVQASLAKMRQGRTTIAIAHRLSTI |
| | | | | | | | | | QDANCIYVLDKGRIIESGTHEELLTLGGTYHKMYS |
| | | | | | | | | | LQAGAMAYTL |
| 20 | peg.1016 | SP1962 | 0 | 6 | unknown | | | NA | MTPEEMYLTERLDVQIAHFLKKSVQHRRRYKVLKI |
| | | | | | | | | | TEIVAGFLIAVFCAIPMPGDRYRLISVALSSLGLLCE |
| | | | | | | | | | GIINLYNAKENWISYQKTAQLLEKEKFLYQCQTEK |
| | | | | | | | | | YAGKTKAFALFVKTCEGLISEEINQWESIQSKEVAA |
| | | | | | | | | | SADAPVKKE |
| 21 | peg.1044 | SP1956 | 0 | 6 | bacteriocin | | | bacteriocin- | MSQKLNHLDVGEFVLLLPEHLRSEEEHYKSVFEDD |
| | | | | | | | | associated integral | LTSRMSSQDERQQMTATVGYLESGQDRFVYNTTPI |
| | | | | | | | | membrane | SYQQFLKDPIIIVITPQSTGPQSILFWIDAVQNYVLF |
| | | | | | | | | | NQLSDAQELIQRQGIENWVSEMQTGYHNYITLLDN |
| | | | | | | | | | IQRERWVMLAGAVLGIATSILLFNTMNRLYFEEFR |
| | | | | | | | | | RAIFIKRIAGLRFLEIHRTYLFAQLGVFLLGFVASVF |
| | | | | | | | | | LQVEVGVAFLVLLLFTGLSLLQLHVQMQKENKMS |
| | | | | | | | | | MLVLKGG |
| 22 | peg.1101 | SP2013 | 0 | 6 | transport | | | abc transporter | MGKKRWARNGSESNDASYAQVVSLYEDTSISVSN |
| | | | | | | | | permease protein | NETDKVLAGSLYTDTNEQGLTIPSSLLKNWNEQTG |
| | | | | | | | | | KNLTANDLIGKSVSASIVESAAEASKIAQFQTKIVR |
| | | | | | | | | | VINDEDDMEDSNSFMLSYQMETILKEAGFTKAVSY |
| | | | | | | | | | FILELKDPSQTKVVTEELQKNKKYTVLSQQRVLDI |
| | | | | | | | | | VITFIRVIQGLLIVLSSQAIVVAAVMIGIIIYINIMQRS |
| | | | | | | | | | KEIGVMKAVGYQNRDVKGIFIYEAIWIVGIALLLAF |
| | | | | | | | | | LVAQGVGSLANAIVSHFYPSITKVFELNLLSVLGTL |
| | | | | | | | | | VFALLLGYVSAYFPARKISKMDPVESLRYE |
| 23 | peg.1190 | SP2103 | 0 | 6 | translation | | | Methyltransferase | MNTNLKPKLQRFASATAFACPICQENLTLLETNFK |
| | | | | | | | | | CCNRHSFDLAKFGYVNLAPQIKQSANYNKENFQN |
| | | | | | | | | | RQQILEAGFYQAILDAVSDLLASSKTTTTILDIGCGE |
| | | | | | | | | | GFYSRKLQESHSEKTFYAFDISKDSVQIAAKSEPNW |
| | | | | | | | | | AVNWFVGDLARLPIKDANMDILLDIFSPANYGEFR |
| | | | | | | | | | RVLSKDGILIKVIPTENHLKEIRQRVQDQLTNKEYS |
| | | | | | | | | | NQDIKEHFQEHFTILSSQTASLTKTITAEQLQALLS |
| | | | | | | | | | MTPLLFHVDQSKIDWSQLTEITIEAEILVGKAF |
| 24 | peg.1234 | SP2145 | 0 | 6 | CHO | | | Alpha-1,2- | MKPLLETIDTRFGTASKHAFSRGNTLPYTGVPFGM |
| | | | | | metabolism | | | mannosidase | NYFVPQTSDQDGSCFFDPHLPIFQGIRLTHQPSPWI |
| | | | | | | | | | GDYSWLLLTPVTSQLGGDSLFHRQSSYDRDKASFQ |
| | | | | | | | | | PHYLKIFSLRYQIETQLTPTCYGASIRLEQKQGKTLS |
| | | | | | | | | | LYLHVADELTVEQVDKRTLALRQEGKTETNKNSL |
| | | | | | | | | | TMFTALQMNTDILAISQEAGDWRIDLASSQTEMQL |
| | | | | | | | | | ATSFISPSQALINLPQEDFDSCKASAQADWENLLHR |
| | | | | | | | | | FDIIETGEADRTFFDHCLYRLFLFPQTFYEVDESGQ |
| | | | | | | | | | AIHMDLATGTVKPGVLFSNNGFWDTFRTTFPLFAL |
| | | | | | | | | | IIPEHYQRFLEGFLNSYRDTGFLPKWLAPDERGMM |
| | | | | | | | | | PGTLLDGIIADSACKDMAPDLEGELFQAMLKTASK |
| | | | | | | | | | ADPLGINGRHGLAQYQELGYLSTDHHESVSHTLDY |
| | | | | | | | | | AYSDFCIANCAKKLKNIEIAETYKAASQNYRQLFD |
| | | | | | | | | | AETGYMRARDNQGNFHPDFSPYSWGRDYAECSAI |
| | | | | | | | | | QATLGVLHDIPGLIQLMGGKETFSNYLLKACQDAP |
| | | | | | | | | | LFETTGYGYEIHEMSEMATAPFGQIAISNQPSFHIPY |
| | | | | | | | | | LFRYSDYPDYTALLIKTLRQKAFHPSWEAYPGDED |
| | | | | | | | | | NGSLSAWYIWSALGFYPTCPGKPSYDLGIPLFDHL |
| | | | | | | | | | RVYLAKENKWLDIHTEQNHSHFNFVKECRLDKTL |
| | | | | | | | | | VSTIQHQDLLKAEQLTFTLSWLPNH |
| 25 | peg.1334 | SP2236 | 0 | 6 | competence | ComD | Yes | Histidine kinase | MDFFLLVDLILYFLIISHSYRLICKDQINRKELFFFG |
| | | | | | | | | | AYTLLTEIVLDFPFYLLYLDGLGIATFLFPLGLYSYF |
| | | | | | | | | | RWMKQYERDRGLFLSLLLSLLYESTHNFLSVTFSSI |
| | | | | | | | | | TGDNFVLQYYGLFFFVVTVLTYFVTLKIIYYFHLEL |
| | | | | | | | | | AYFDKDYLYPFLKKVFFALLLLHIVSFVSDMVSTIK |
| | | | | | | | | | HLNSFGSILSSIVFISLLLTFFAMNSHKVQMEKEIAL |
| | | | | | | | | | KQKKFEQKHLQNYTDEIVGLYNEIRGFRHDYAGM |
| | | | | | | | | | LVSMQMAIDSGNLQEIDRVYNEVLVKANHKLRSD |
| | | | | | | | | | KYTYFDLNNIEDSALRSLVAQSIVYARNNGVEFTL |
| | | | | | | | | | EVKDTITKLPIELLDLVRIMSVLLNNAVEGSADSYK |
| | | | | | | | | | KQMEVAVIKMETETVIVIQNSCKMTMTPSGDLFAL |
| | | | | | | | | | GFSTKGRNRGVGLNNVKELLDKYNNIILETEMEGS |
| | | | | | | | | | TFRQIIRFKRKFE |
| 26 | peg.1455 | n/a | 0 | 6 | Unknown | | | | MKNKRYFFDTILIILLLISTIFCVSPVFIKLDILGTPSH |
| | | | | | | | | | AILTFVLAIPLFYILSQCLHTLLLLVSSIFCKLRPIYF |
| | | | | | | | | | YFIFVIIIGARKYYRILFHQLMGFSPGIAVFYKESQT |
| | | | | | | | | | TKNLFKFYYFLYFTTLISYYFFFTFVYDKPLLLPLIS |
| | | | | | | | | | FSIIIALVQKLYRIENQQLFLLKSKVLTILESKKNCEF |
| | | | | | | | | | NLQDYHEIWKLQSKSELPCVALSYISLIKPYLSESV |
| | | | | | | | | | REQIDLLEVKRFKKINHPISLYGMLDVIKLNLYLRH |
| | | | | | | | | | YNEKNKYESMLKKILEVRPDFVLIEQNIDDSLNSSQ |
| | | | | | | | | | PLSLSLAISEIQLLLEVYMGIKHVSIRR |
| 27 | peg.1463 | SP0117 | 0 | 6 | unknown | | | Choline binding | MNKKKMILTSLASVAILGAGFVTSQPTFVRAEEAP |
| | | | | | | | | protein A | VASQSKAEKDYDAAMKKSEAAKKAYEEAKKKAE |
| | | | | | | | | | DAQKKYDEGQKKTEEKARKAEEASKEIAKATSEV |
| | | | | | | | | | QNAYVKYQRVQRNSRLNEKERKKQLAEIDEEINK |
| | | | | | | | | | AKQILNEKNEDFKKVREEVIPEPTELAKDQRKAEE |
| | | | | | | | | | AKAEEKVAKRKYDYATLKVALAKSKVEAEEAELD |
| | | | | | | | | | NKAENLQNKVADLEKEIANAEKTVADLEKEVAKL |
| | | | | | | | | | EKDVEDFKNSNGEQAEQYLAAAEKDLVAKKAELA |
| | | | | | | | | | EAKIKAATKKAELEKAEAELENLLSTLDPEGKTQD |
| | | | | | | | | | ELDKEAAEAELNKKVEALQNQVAELEEELSKLED |
| | | | | | | | | | NLKDAETNNVEDYIKEGLEEAIATKKAELEKTQKE |
| | | | | | | | | | LDAALNELGPDGDEEETPAPAPQPEKPAPAPAPKP |
| | | | | | | | | | EQPAPAPKPEQPAPAPKPEKSADQQAEEDYARRSE |
| | | | | | | | | | EEYNRLTQQQPPKAEKPAPAPAPKPEQPAPAPKTG |
| | | | | | | | | | WKQENGMWYFYNTDGSMATGWLQNNGSWYYL |
| | | | | | | | | | NSNGAMATGWLQYNGSWYYLNANGAMATGWA |
| | | | | | | | | | KVNGSWYYLNANGSMATGWVKDGDTWYYLEAS |
| | | | | | | | | | GAMKASQWFKVSDKWYYVNSNGAMATGWLQY |
| | | | | | | | | | NGSWYYLNANGAMATGWAKVNGSWYYLNANGS |
| | | | | | | | | | MATGWVKDGDTWYYLEASGAMKASQWFKVSDK |
| | | | | | | | | | WYYVNGSGSLAVNTTVDGYTVNENGEWV |
| 28 | peg.1817 | n/a | 0 | 6 | unknown | | | NA | MDKMKPVFQALNKELIQENLTLTIICVGGYVLEYH |
| | | | | | | | | | GLRATQDVDAFYDQNQKINEIIARVGKQFNLNTHE |
| | | | | | | | | | ELWLNNHVANMNKQPPLSLCESLYSFENLTVLVV |
| | | | | | | | | | PIEYVLGMKMMSIREQDLKDIGAIIKYKNFHSPFDT |
| | | | | | | | | | FKYLKDMGFDTIDLSVLLEGFSYAYGMDWLEKFF |
| | | | | | | | | | KENQDKLREFY |
| 29 | peg.1823 | SP0480 | 0 | 6 | transport | | | potassium transporter | MKIILVGGGKVGFALCRSLVAEKHDVLLIEQDEAV |
| | | | | | | | | peripheral membrane | LNHIVSRFDIIGILGNGADFAILEQASVQDCDIFIALT |
| | | | | | | | | | EHDEVNMIAAVLAKKMGAKETIVRVRNPEYSNSY |
| | | | | | | | | | FKEKNILGFSLIVNPELLAARAIANIIDFPNALSVERF |
| | | | | | | | | | AGGRVSLMEFVVKSTSGLCQMPISDFRKKFGNVIV |
| | | | | | | | | | CAIERDHQIIIPSGDMTVQDKDRIFVTGNRVDMILF |
| | | | | | | | | | HNYFKSRAVKSLLIVGAGRIAYYLLGILKDSRIDTK |
| | | | | | | | | | VIEINPEIASFFSEKFPNLYIVQGDGTAKDILLEESAQ |
| | | | | | | | | | HYDAVATLTGVDEENLITSMFLDRVGVQKNITKV |
| | | | | | | | | | NRTSLLEIINAPDFSSIITPKSIAVDTIMHFIRGRVNA |
| | | | | | | | | | QYSDLQAMHHLANGQIETLQFHIKEANKMTAKPL |
| | | | | | | | | | SQLKLKKGVLIAAIIRKGKTIFPTGEDMLEVGDKLL |
| | | | | | | | | | VTTLLPNITKIYDLIAR |
| 30 | peg.2077 | SP_0752 | 0 | 6 | Amino acid | | | ABC transporter | MALLEVKQLTKHFGGLTAVGDVTLELNEGELVGLI |
| | | | | | transport | | | | GPNGAGKTTLFNLLTGVYEPSEGTVTLDGHLLNGK |
| | | | | | | | | | SPYKIASLGLGRTFQNIRLFKDLTVLDNVLIAFGNH |
| | | | | | | | | | HKQHVFTSFLRLPAFYKSEKELKDKALELLKIFDLD |
| | | | | | | | | | GDAETLAKNLSYGQQRRLEIVRALATEPKILFLDEP |
| | | | | | | | | | AAGMNPQETAELTELIRRIKDEFKITIMLIEHDMNL |
| | | | | | | | | | VMEVTERIYVLEYGRLIAQGTPDEIKTNKRVIEAYL |
| | | | | | | | | | GGEA |
| 31 | peg.0039 | SP0921 | 0 | 5 | Polyamine | | | Agmatine deiminase | MMDSPKKLGYHMPAEYEPHHGTLMIWPTRPGSW |
| | | | | | metabolism | | | | PFQGKAAKRAFTQIIETIAEGERVYLLVEQAYLSEA |
| | | | | | | | | | QSYLGDKVVYLDIPTNDAWARDTGPTILVNDKGK |
| | | | | | | | | | KLAVDWAFNAWGGTYDGLYQDYEEDDQVASRFA |
| | | | | | | | | | EALERPVYDAKPFVLEGGAIHSDGQGTILVTESCLL |
| | | | | | | | | | SPGRNPNLTKEEIENTLLESLGAEKVIWLPYGIYQD |
| | | | | | | | | | ETNEHVDNVAAFVGPAELVLAWTDDENDPQYAM |
| | | | | | | | | | SKADLELLEQETDAKGCHFTIHKLPIPAVRQVVTEE |
| | | | | | | | | | DLPGYIYEEGEEKRYAGERLAASYVNFYIANKAVL |
| | | | | | | | | | VPQFEDVNDQVALDILSKCFPDRKVVGIPARDILLG |
| | | | | | | | | | GGNIHCITQQIPE |
| 32 | peg.0074 | SP0954 | 0 | 5 | competence | ComEC | | Competence protein | MLQWIKNFSIPLIYLSFLLLWLYYAIFSASYLALLGF |
| | | | | | | | | | VFLLVCLFIQFPWKSAGKVLIICGIFGFWFVFQNWQ |
| | | | | | | | | | QSQASQNLADSVERVRILPDTIKVNGDSLSFRGKSN |
| | | | | | | | | | GRAFQVYYKLQSEEEKEAFQALTDLHEIGLEGKLS |
| | | | | | | | | | EPEGQRNFGGFNYQAYLKTQGIYQTLNIKTIQSLQ |
| | | | | | | | | | KIGSWDIGENLSSLRRKAVVWIKTHFPDPMGNYM |
| | | | | | | | | | TGLLLGHLDTDFEEMNELYSSLGIIHLFALSGMQV |
| | | | | | | | | | GFFMNGFKKLLLRLGLTQEKLKWLTYPFSLIYAGL |
| | | | | | | | | | TGFSASVIRSLLQKLLAQHGVKGLDNFALTVLVLFI |
| | | | | | | | | | VMPNFFLTAGGVLSCAYAFILTMTSKEGEGLKAVT |
| | | | | | | | | | SESLVISLGILPILSFYFAEFQPWSILLTFVFSFLFDLV |
| | | | | | | | | | FLPLLSILFVLSFLYPVIQLNFIFEWLEGIIRLVSQVA |
| | | | | | | | | | RRPLVFGQPNAWLLILLLISLALVYDLRKNIKGLTV |
| | | | | | | | | | LSLLITGLFFLTKYPLENEITMLDVGQGESIFLRDVT |
| | | | | | | | | | GKTILIDVGGKAESYKKIKKWQEKMTTSNAQRTLI |
| | | | | | | | | | PYLKSRGVAKIDQLILTNTDKEHVGDLSEMTKAFH |
| | | | | | | | | | VGEILVSKDSLKQKEFVAELQATQTKVRSMIVGEN |
| | | | | | | | | | LPIFGSQLEVLSPRKMGDGGHDDTLVLYGKFLDKQ |
| | | | | | | | | | FLFTGNLEEKGEKDLLKHYPDLKVNVLKASQHGN |
| | | | | | | | | | KKSSSPAFLEKLKPELTLISVGKSNRMKLPHQETLT |
| | | | | | | | | | RLEGINSKVYRTDQQGAIRFKGLDSWKIESVR |
| 33 | peg. 0166 | SP1046 | 0 | 5 | CHO | | | alpha amylase, | MYYKQQISEVMFNLLDSHDTERILWTANEDVQLV |
| | | | | | metabolism | | | catalytic region | KSALAFFFLQKGTPCIYYGTELALTGGPDPDCRRC |
| | | | | | | | | | MPWERVSSDNDMLNFMKRLIKIRKYASVIISHGKY |
| | | | | | | | | | SLQEIKSDLVALEWKYEGRILKVIFNQSTEDYLLEK |
| | | | | | | | | | EAVALASNCQELENQLVISPDGFVIF |
| 34 | peg.0169 | SP1051 | 0 | 5 | plasmid | | | zeta toxin | MEIQDYTDSEFKHALARNLRSLTRGKKSSKQPIAIL |
| | | | | | | | | | LGGQSGAGKTTIHRIKQKEFQGNIVIIDGDSFRSQH |
| | | | | | | | | | PHYLELQQEYGKDSVEYTKDFAGKMVESLVTKLS |
| | | | | | | | | | SLRYNLLIEGTLRTVDVPKKTAQLLKNKGYEVQLA |
| | | | | | | | | | LIATKPELSYLSTLIRYEELYIINPNQARATPKEHHD |
| | | | | | | | | | FIVNHLVDNTRQLEELAIFERIQIYQRDRSCVYDSK |
| | | | | | | | | | ENTTSAADVLQELLFGEWSQVEKEMLQVGEKRLN |
| | | | | | | | | | ELLEK |
| 35 | peg.0185 | SP0637 | 0 | 5 | transport | | | transporter, permease | MTKLWKRYKPFVSAGIQELITYRVNFFLYRIGDVM |
| | | | | | | | | | GAFVAFYLWKAVFDSSHQSLIQGFTLSDMTLYIIM |
| | | | | | | | | | SFVTNLLTKSDSSFMIGWEVKDGSIIMRLLRPVHFA |
| | | | | | | | | | MSYLFTEIGSRWLVFVSVGLPFVILIAGLKLLSGESF |
| | | | | | | | | | LQIVLITTVYLLSLILAFLINFFSIFALVFQLLCLKTY |
| | | | | | | | | | GDQIF |
| 36 | peg.0248 | SP_1118 | 0 | 5 | CHO | | | pullulanase | MYNYPMRIHYHRKNGEYDTCSFVKSQDQRIDLLT |
| | | | | | metabolism | | | | YKEDYFGALFSFEHPSSHVIESLNFVVHTGQTSKEY |
| | | | | | | | | | SIRFNHYPLLTEVWILEGDDRIYYSENPAIASPFYKN |
| | | | | | | | | | QNPFAFDKAINSASFDHHWGYQGELGCRVEDNQA |
| | | | | | | | | | HFSLWSPTATEVQVVVYESAANDAPVWKTFEMKR |
| | | | | | | | | | GNSYSYNHKENTIGVWSLDVEENLVGKTYQYQVQ |
| | | | | | | | | | FPHHQTLTRDPYTIATSPDGKRSAILSHVEKQVENF |
| | | | | | | | | | EVKHGSEATWRLENPCKAVICEMHIRDLTKSPTSG |
| | | | | | | | | | VDEHLRGTFLGAAQAGTVNQYGQSTAFDYIKKLG |
| | | | | | | | | | YNYVQLQPIADRHKEYDEDGNVTYNWGYDPQNY |
| | | | | | | | | | NAPETSFSTNPDDPAQVIRDLKVMVQAYHDAGIGV |
| | | | | | | | | | IMDVVYNHTFSVVDAPFQTTVPDYYYRMNPDGTF |
| | | | | | | | | | QNGTGVGNETASEHEMFRKYMIDSLLYWVQEYNI |
| | | | | | | | | | DGFRFDLMGIHDVKTMQMIRQSLDEIDSNIILYGEG |
| | | | | | | | | | WDMGTGLAPYDKAKKDNAYQMPNIGFFNDNQRD |
| | | | | | | | | | AVKGGEVYGAIKSGFVSGAATEPILAKAILGSRELG |
| | | | | | | | | | SYTHPNQVLNYVEAHDNYNLHDLLATLHPDQSSE |
| | | | | | | | | | QIMRKVETATAMNLLMQGMAFMEIGQEFGRTKLV |
| | | | | | | | | | ATGENGELTHDDRERAMNSYNAPDSVNQVNWNLI |
| | | | | | | | | | NERQDSIEFIRQVIRLKTKTGAFSYSSYDEIYHHVFV |
| | | | | | | | | | HSAIEHSGCLIYEVHGKEHLLVVVNAKSEPYQFEN |
| | | | | | | | | | AGNLAMLVTNSRSKEDNVLNDISLAVLSVL |
| 37 | peg.0249 | SP_1119 | 0 | 5 | CHO | | | Aldehyde | LTRYQNLVNGKWKSSEQEITIYSPINQEELGTVPA |
| | | | | | metabolism | | | dehydrogenase | MTQTEADEAMQAARAALPAWRALSAVERAAYLH |
| | | | | | | | | | KTAAILERDKEEIGTILAKEVAKGIKAAIGEVVRTA |
| | | | | | | | | | DLIRYAAEEGLRITGQAMEGGGFEAASKNKLAVV |
| | | | | | | | | | RREPVGIVLAIAPFNYPVNLSASKIAPALIAGNVVM |
| | | | | | | | | | FKPPTQGSISGLLLAKAFEEAGIPAGVFNTITGRGSE |
| | | | | | | | | | IGDYIIEHKEVNFINFTGSTPIGERIGRLAGMRPIMLE |
| | | | | | | | | | LGGKDAALVLEDADLEHAAKQIVAGAFSYSGQRC |
| | | | | | | | | | TAIKRVIVLESVADKLATLLQEEVSKLTVGDPFDN |
| | | | | | | | | | ADITPVIDNASADFIWSLIEDAQEKEAQALTPIKRE |
| | | | | | | | | | GNLLWPVLFDQVTKDMKVAWEEPFGPVLPIIRVAS |
| | | | | | | | | | VEEAIAFANESEFGLQSSVFTNDFKKAFEIAEKLEV |
| | | | | | | | | | GTVHINNKTQRGPDNFPFLGVKGSGAGVQGIKYSI |
| | | | | | | | | | EAMTNVKSIVFDVK |
| 38 | peg.0401 | n/a | 0 | 5 | unknown | | | NA | LANNRKTETLGVSYLSTFIDKHELLQSYFESNDKTP |
| | | | | | | | | | VWDGEIHVLKSPSEKKDEILGKVPVQIKTTRQKKD |
| | | | | | | | | | VLKSFSLDTRDLELYKPNGGVVLFVVWLNEDNGL |
| | | | | | | | | | RDIYYKSLPPLSIKNLLKKSKLKNKSTNRKKLSIEIF |
| | | | | | | | | | KLDEKKMYPMLVDFINNSQKQYSFINVEGISVEDIP |
| | | | | | | | | | DDKTLKFYFYGQEKEEIFNYQEEHDLFIYYLDPITG |
| | | | | | | | | | IEIPLENTIKIVETEEETDLIIKIGDYVFQDVKRHRFP |
| | | | | | | | | | DGSVQLHFGESFTMSFDIKKKQFKFNYTRPDLLSK |
| | | | | | | | | | AIKCTQVFQELGKIGYFTLNGNKIELDERSIKDISSL |
| | | | | | | | | | DLEADIKGLLKISNFMKKMGIQKDVDLSCFDKQSQ |
| | | | | | | | | | RNLNILYSGLVLKKKVALNYNESKLLHLNIANIHII |
| | | | | | | | | | TLYSFLSDKNGTMIDIFTETPWCREGETEDEDYLDI |
| | | | | | | | | | SIFEVFEPNDWLKIDNCKIDSVIASYQRLVDNKLKY |
| | | | | | | | | | EGADRTILKIVIAADMAEDKTKRELLLNWAQCLSD |
| | | | | | | | | | WNLKYSKNCEMAIINDLQIKSRVRKLNSKETETLT |
| | | | | | | | | | NILVNSNDNYELCFGSSVLLKSKPQADLFWNKLDN |
| | | | | | | | | | ETKERYKDFPIYTLYMKLS |
| 39 | peg.0403 | n/a | 0 | 5 | unknown | | | cell wall binding | MKKILLSTVALLSLVASLLANNPVSAQESSSQATYS |
| | | | | | | | | | KSSGSWIKSGNRWWYKHSDGSYTTNGWEKINGT |
| | | | | | | | | | WYYFDSEGWMKTGWIKEYGKWYYLDDSGAMKT |
| | | | | | | | | | GWCLVSGSWYYLNSSGVMQTGLQTINGKQYYLA |
| | | | | | | | | | AGGAMQTGWHNIGDDTYFFANSGENQNINRRALV |
| | | | | | | | | | LGETSTRAVPIADVNAMEKVFNNQNFSEVVRFPDR |
| | | | | | | | | | TKSEIIAKMQELFESSSEGDVNYLYFTCHGGRDGRI |
| | | | | | | | | | YIGSDGLAFSGWELASVLKQYKGKFVVMLDCCHA |
| | | | | | | | | | GTIISKDNTGEGNEGASTEYFDLDEFVSGFSNMDG |
| | | | | | | | | | NEKSGEMIDSKFLVLCSSRGAEYSSGGSLSLATKY |
| | | | | | | | | | WSLGSGWNPLQNSQAYLAADQNNNRRITLNELYT |
| | | | | | | | | | YSREQVLKQNSNQHIEVYPDNSQFVLFKK |
| 40 | peg.0430 | n/a | 0 | 5 | CHO | | | Converts N- | METKKIKNLKGQIIVSCQALEGEPLYTPNGGVMPL |
| | | | | | metabolism | | | acetylmannosamine- | LAKAAFQAGAKGIRANSVRDISEIKEEVDLPIIGIIK |
| | | | | | | | | 6-phosphate | RDYDGFEPFISATMKEIDELVSEGVDILALDCTNRS |
| | | | | | | | | (ManNAc-6-P) to N- | RPGYDNITDFIHDIKVKYPNQLLMADISTFEEGKVA |
| | | | | | | | | acetylglucosamine-6- | AESGVDFVGTTLSGYTPYSPKKDNPDFELVERLVK |
| | | | | | | | | phosphate (GlcNAc- | ELDVPVIAEGRISTPEQARKMLDLGAYAVVVGGAI |
| | | | | | | | | 6-P) (By similarity) | TRPLEIAKKFIEVV |
| 41 | peg.0485 | n/a | 0 | 5 | Bacteriocin | | | NA | MKFKKIVTSALVVLSLFSIMSPSIASVRVFADDVTT |
| | | | | | | | | | TEVSEISTQEQKQIDDVANVLEQMFRNGVNEKNFT |
| | | | | | | | | | EYVYKNFSQKDIALAENELETNINNPYDRVPWDE |
| | | | | | | | | | MGGCIAGKIRDEFFAMINVSLIVKYAQKKAWSELA |
| | | | | | | | | | KVVLRFVKANGLKTNIYIIAGQLAIWAVQCGLE |
| 42 | peg. 0514 | SP1423 | 0 | 5 | unknown | | | | MKNRFYYYQLLDEREEQLFNKAGSESFYICIALSLL |
| | | | | | | | | | SYIISVLAPSLFNSNMLLIVIIIGTFYFFNRARYLGVT |
| | | | | | | | | | YYSRFHFTILGCFFLTLAITALLMLQNYQFNIEIYQH |
| | | | | | | | | | NPLNFKYLSAWVITYVIYLPWVFIGNLGLKSYGEW |
| | | | | | | | | | AQKKFEQDMDELESGE |
| 43 | peg.0524 | SP1430 | 0 | 5 | DNA | | | DNA methylase n-4 | MTVLKGDNLEILKTIESSSIDLIYMDPPFFTQKTQKL |
| | | | | | methylation | | | n-6 domain protein | SNNKNIMYSFEDTWTSIEDYKEFLSVRLEECKRVL |
| | | | | | | | | | KNSGSIFVHCDKIANHHIRLILDNIFGADMFQSEIIW |
| | | | | | | | | | NYKRWSNSKKGLLNNHQNIYFYSKSKDFKFNTIFT |
| | | | | | | | | | EYSSTTNIDQILVERKRDGNSKTIYKVDNNGNYILA |
| | | | | | | | | | KEKNGVPLSDVWNIPFLNPKAKERVGYPTQKPILL |
| | | | | | | | | | LEQIIKIATDKNDIVLDPFCGSGTTLVASKILNRNY |
| | | | | | | | | | MGIDLSEEAINITQQRLENVIKTSSNLLNKGIEAYRT |
| | | | | | | | | | KTEEEENILKLLQAKIVQRNKGIDGFLPKHFQKKPI |
| | | | | | | | | | PIKIQKNNECLNESISLLQNAINSKKLDFGVVIKTHS |
| | | | | | | | | | DNLLFDFDTIPENIIVVDHFELTIEKWLSKSQQLL |
| 44 | peg.0529 | SP1449 | 0 | 5 | unknown | CppA | Yes | CppA protein | MNVNQIVRIIPTLKANNRKLNETFYIETLGMKALLE |
| | | | | | | | | | ESAFLSLGDQTGLEKLVLEEAPSMRTRKVEGRKKL |
| | | | | | | | | | ARLIVKVENPLEIEGILSKTDSIHRLYKGQNGYAFEI |
| | | | | | | | | | FSPEDDLILIHAEDDRASLVEVGEKPEFQTDLASISL |
| | | | | | | | | | SKFEISMELHLPTDIESFLESSEIGASLDFIPAQGQDL |
| | | | | | | | | | TVDNTVTWDLSMLKFLVNELDIASLRQKFEFTEYF |
| | | | | | | | | | IPKSEKFFLGKDRNNVELWFEEV |
| 45 | peg.0669 | SP1587 | 0 | 5 | transport | | Yes | Major Facilitator | MKSNRYIIAFAGVILHLMLGSTYAWSVYRNPIIEKT |
| | | | | | | | | | GWDQASVAFAFSLAIFCLGLSAAFMGRLVEKFGPR |
| | | | | | | | | | VMGSLSAFLYAGGNILTGFAIDRQELWLLYLAYGI |
| | | | | | | | | | LGGLGLGAGYITPVSTIIKWFPDKRGLATGLAIMGF |
| | | | | | | | | | GFASLLTSPIAQHLIAGVGLVETFYILGASYFIIMLL |
| | | | | | | | | | ASQFIKRPNEQELAILSASGKEKTDSLTQGMTANQ |
| | | | | | | | | | ALKSNRFYILWIIFFINIACGLGLISAASPMAQEMAG |
| | | | | | | | | | LSTSHAAVMVGVLGIFNGFGRLLWASLSDYIGRPL |
| | | | | | | | | | TFSILLLVNLFFSLSLWLFTDSVLFVVAMSILMTCY |
| | | | | | | | | | GAGFSLIPAYLSDIFGTKELAALHGYILTAWAMAG |
| | | | | | | | | | LAGPILLAETYKMAHSYTQTLFVFLILYSIALALSY |
| | | | | | | | | | YLGRSIKKESQKPLT |
| 46 | peg.0749 | SP1674 | 0 | 5 | regulation | | | transcriptional | MDKPDIATIIDSHFEEMTDLEQEIARYFLQAETITDD |
| | | | | | | | | regulator | LSSQQVTQKLHISQAALTRFAKKCGFTGYREFIFQY |
| | | | | | | | | | QHQAENQANQVSKHSPLTKRVLRSYSNMREQTQD |
| | | | | | | | | | LIDEIQLERIAQLIEDAERIYFFGTGSSGLVAREMKL |
| | | | | | | | | | RFMRLGVVCEALTDQDGFAWTTSIMDENCLVLGF |
| | | | | | | | | | SLSGSTPSILDSLLDAKEMGAKTVLFTSVPNKDSQT |
| | | | | | | | | | YTETVLVATHSQPSYIQRISAQLPMLFFIDLIYAYFL |
| | | | | | | | | | EINRESKEKIFNSYWENKKLNGYRRQKRVRKS |
| 47 | peg.0755 | SP1681 | 0 | 5 | CHO | | Yes | ABC transporter | MQSTEKKPLTAFTVISTIILLLLTVLFIFPFYWILTGA |
| | | | | | transport | | | (Permease) | FKSQPDTIVIPPQWFPKMPTMENFQQLMVQNPALQ |
| | | | | | | | | | WMWNSVFISLVTMFLVCATSSLAGYVLAKKRFYG |
| | | | | | | | | | QRILFAIFIAAMALPKQVVLVPLVRIVNFMGIHDTL |
| | | | | | | | | | WAVILPLIGWPFGVFLMKQFSENIPTELLESAKIDG |
| | | | | | | | | | CGEIRTFWSVAFPIVKPGFAALAIFTFINTWNDYFM |
| | | | | | | | | | QLVMLTSRNNLTISLGVATMQAEMATNYGLIMAG |
| | | | | | | | | | AALAAVPIVTVFLVFQKSFTQGITMGAVKG |
| 48 | peg.0760 | SP1686 | 0 | 5 | metabolism | | | oxidoreductase | MVKYGVVGAGYFGAELARYMQKNDGAEITLLYD |
| | | | | | | | | | PDNAEAIAEELGAKVASSLDELVSSDEVDCVIVATP |
| | | | | | | | | | NNLHKEPVIKAAQHGKNVFCEKPIALSYQDCREM |
| | | | | | | | | | VDACKENNVTFMAGHIMNFFNGVHHAKELINQGV |
| | | | | | | | | | IGDVLYCHTARNGWEEQQPSVSWKKIREKSGGHL |
| | | | | | | | | | YHHIHELDCVQFLMGGMPETVTMTGGNVAHEGE |
| | | | | | | | | | HFGDEDDMIFVNMEFSNKRFALLEWGSAYRWGEH |
| | | | | | | | | | YVLIQGSKGAIRLDLFNCKGTLKLDGQESYFLIHES |
| | | | | | | | | | QEEDDDRTRIYHSTEMDGAIAYGKPGKRTPLWLSS |
| | | | | | | | | | VIDKEMRYLHEIMEGAPVSEEFAKLLTGEAALEAI |
| | | | | | | | | | ATADACTQSMFEDRKVKLSEIVK |
| 49 | peg.0777 | SP1704 | 0 | 5 | transport | | | ABC transporter | MRLEIINGQKIYGKRPILNQLNLVFQSGKIYGLKGD |
| | | | | | | | | | NGSGKTVLLKILAGYIKLDKGKVLQDGKVYGVKN |
| | | | | | | | | | HYIQDAGILIEKVEFLSHLSLRENLELLRYFSSKVTE |
| | | | | | | | | | KRIAYWIQYYDLQEFEDIEYRHLSLGTKQKMALIQ |
| | | | | | | | | | AFISSPSILFLDEPMNALDEKSVRITKQVILSYLKKE |
| | | | | | | | | | NGLVILTSHISEDISDLCTDVLVVENGHIQM |
| 50 | peg.0854 | SP1795 | 0 | 5 | CHO | | | sucrose-6-phosphate | MGDKKYTVEKANRFIAENKHLVNTQYKPEEHFSA |
| | | | | | metabolism | | | hydrolase | EIGWINDPNGFVYFRGEYHLFYQFYPYDSVWGPM |
| | | | | | | | | | HWGHAKSKDLVTWEHLPVALAPDQDYDRNGCFS |
| | | | | | | | | | GSAIVKDDRLWLMYTGHIEEETGVRQVQNMAFSD |
| | | | | | | | | | DGIHFEKIEQNPVATGSDLPDELIAADFRDPKLFEK |
| | | | | | | | | | DGRYYSVVAAKHKNNVGCIVLLGSDNLVEWQFES |
| | | | | | | | | | IFLKGVEHQGFMWECPDYFELDGKDCLIMSPMRY |
| | | | | | | | | | QREGDSYHNINSSLLFTGKVDWGEKCFIPESVQEID |
| | | | | | | | | | HGQDFYAPQTLLDDQNRRILIAWMQTWGRTLPTH |
| | | | | | | | | | DQEHKWACAMTLPRILRLEDGKLRQFPVKKGQYQ |
| | | | | | | | | | IQIDKDCHYHLGNDIDYLEFGYDSNAQQVYIDRSH |
| | | | | | | | | | LIQKILGEEEQDTSRRYVDIEAKELEVVLDKNSIEIF |
| | | | | | | | | | VNQGEASLTATYYLTVPAELSRID |
| 51 | peg.0873 | n/a | 0 | 5 | metabolism | | | PEP | MKRLISANPSEILQMNAEELKQSILASEGRVVLSEN |
| | | | | | | | | phosphonomutase | VVTRETFVGDITNSEIARAFGADMILLNCVDVFEPK |
| | | | | | | | | family protein | IYALDSSGDDVIHRLHQLVACPIGVNLEPIDPSAKM |
| | | | | | | | | | LEETQEIVAGRVASVETLNRIEELGFDFVCLTGNPG |
| | | | | | | | | | TGVSNQEIIKAVQSAKENFSGLIIAGKMHGAGVNE |
| | | | | | | | | | PVAELSVAEQLLEAGADVILVPAVGTVPAFHDQEL |
| | | | | | | | | | REVVDLVHSKGGLVLSAIGTSQETSDTDTIKEIALR |
| | | | | | | | | | NKICGVDIQHIGDAGYGGLATVDNIYALSKAIRGV |
| | | | | | | | | | RHTVSRLARSVNR |
| 52 | peg.0875 | n/a | 0 | 5 | regulation | | | ROK family | MTLSKKQLQLRAKILETVYTLGPISRIEIATKTGITP |
| | | | | | | | | | ATTSSITNDLIKENILLELGEDEHDTSVGRKKILLDI |
| | | | | | | | | | QAKRFYYIGCELSEKHFTFALGDNLGNILKEEKEIV |
| | | | | | | | | | TKQLIQEKGNQLINQTLKQFLNNCSDYEIEAIGIALP |
| | | | | | | | | | GRYLDNYKITTNNPLWQHIDLEMIQSHFDKPLFFS |
| | | | | | | | | | NNVNCMAIGKRLFSRQQNDPNFAYFHFARGMHCS |
| | | | | | | | | | YIYDGNIYGKGNLMIGEIGHTVVSSEGEECSCGRK |
| | | | | | | | | | GCLQTFAGESWLIKKSKILYHQSPYSLLPSLVKNAD |
| | | | | | | | | | DIDIQVILTAYQLGDTGIITLIHQALLYLSQTILNISM |
| | | | | | | | | | MIDSQKIYLHSPLLTNQHIIQKLYSEMNYKPKLLYN |
| | | | | | | | | | RLPEVIIEPYNDFTAAHSAIALCLYHTILHS |
| 53 | peg.0896 | SP1830 | 0 | 5 | regulation | | | Plays a role in the | MLRLYLENEIIELSNNLETIWVSVLDKYEKLFEYLS |
| | | | | | | | | regulation of | NEERIELIKEDLIINESVLNVDKKGYELICLQHPVSY |
| | | | | | | | | phosphate uptake | DLRRIISVIKISTDIERIGDRIVEILKNLQIIQNNEILKK |
| | | | | | | | | | IISEIKILHEVIGLHMNRAISCYREEQSGCLDMVVIQ |
| | | | | | | | | | KQNEIEELSINMEKKIMNYIFEDDGNVSEVISALDII |
| | | | | | | | | | HHLDKIAHTTQAIYKWIMYRKYGNIN |
| 54 | peg.1022 | SP1933 | 0 | 5 | regulation | | | NA | MNVKKIMSIFQSFYVDVSIEELTLTLPISFVKRFEYT |
| | | | | | | | | | QMTFHKESFLLIKEKRRGSLSSFVTQARTMGEKAN |
| | | | | | | | | | MDVVLVFSKLSDSEKKQLLQARVPFVDFKGNLFFP |
| | | | | | | | | | PLGLVLNANDTEVPKELTPSEQLTWIAFLLTKGQK |
| | | | | | | | | | VVDVDLLSQVTGLPNSTIYRCLRTFKALYWLNKQ |
| | | | | | | | | | NKLYTYTVSKKELFLKSVSCLFNPIKKRILLPDGDI |
| | | | | | | | | | KQIKSVSNLLYGGAYALSHSTFLAETDENISYVIWQ |
| | | | | | | | | | RKFNQLSLPLSQHVLK |
| 55 | peg.1023 | SP1934 | 0 | 5 | unknown | | | NA | LVAKGSAEIVSIDIGTEEYALYRDLTRNHDNNKIIG |
| | | | | | | | | | KGEAASISLAKKHNGILGSNNLRDVKSYVEEFSLE |
| | | | | | | | | | HMTTGDILIEAFKA |
| 56 | peg.1076 | SP1989 | 0 | 5 | regulation | | | Transcriptional | MLIGQKIKEIRIEKGISRPDFCGDEQELTVRQLSRIES |
| | | | | | | | | regulator | GASQPSLPKLDYIARRLGVPVYSLMPDFSALPSAYL |
| | | | | | | | | | ELKYQILREPIYGKEEEYDKKEACLEEIYKTYFDNL |
| | | | | | | | | | PKEEQLACEVLQACLDTSRTRRPEYAELILEEHMS |
| | | | | | | | | | QIIEKEVYSTNDMLLIRLFFYQMLIRKDLAKFINQIE |
| | | | | | | | | | KLMLFLLEQKKVTQIENYFIIRDTLISGMCCLEKVG |
| | | | | | | | | | VTDCFNDYLSCLQEIMDKTQDYQKKPLVFMFLWK |
| | | | | | | | | | QALRVERDFSLAESFYQSSKTFAKLIGDGFLVKKLT |
| | | | | | | | | | EEWQEDVKKYL |
| 57 | peg.1118 | SP2031 | 0 | 5 | CHO | | Yes | L-ascorbate 6- | MPNVKEITRESWILATFPEWGTWLNEEIEEEVVPEG |
| | | | | | metabolism | | | phosphate lactonase | NFAMWWLGNCGTWIKTPAGANVVMDLWSNRGK |
| | | | | | | | | | STKKVKDMVRGHQMANMAGVRKLQPNLRVQPM |
| | | | | | | | | | VIDPFAINELDYYLVSHFHSDHIDPYTAAAILNNPK |
| | | | | | | | | | LEHVKFIGPYHCGRIWEGWGVPKERIIVVKPGDTIE |
| | | | | | | | | | LKDMKIHAVESFDRTCLVTLPVNGADETGGELAG |
| | | | | | | | | | LAVTDEEMAQKAVNYIFETPGGTIYHGADSHFSNY |
| | | | | | | | | | FAKHGKDFKIDVALNNYGENPVGIQDKMTSIDLLR |
| | | | | | | | | | MAENLRTKVIIPVHYDIWSNFMASTNEILELWKMR |
| | | | | | | | | | KDRLQYDFHPFIWEVGGKYTYPQDQHLVEYHHPR |
| | | | | | | | | | GFDDCFEQDSNIQFKALL |
| 58 | peg.1181 | SP2095 | 0 | 5 | signaling | | | Rhomboid family | MKEIFDRRYPVTSFFLLVTALVFLLMLVTAGGNFD |
| | | | | | | | | | RADTLFRFGAMYGPAIRLFPEQVWRLLSAIFVHIG |
| | | | | | | | | | WEHFIVNMLSLYYLGRQVEEIFGSKQFFFLYLLSG |
| | | | | | | | | | MMGNLFVFVFSPKSLAAGASTSLYGLFAAIIVLRY |
| | | | | | | | | | ATRNPYIQQLGQSYLTLFVVNIIGSVLIPGISLAGHI |
| | | | | | | | | | GGAVGGAFLAVIFPVRGEKRMYNTSQRLGAVVLF |
| | | | | | | | | | VGLAILLFYKGMGM |
| 59 | peg.1198 | SP2112 | 0 | 5 | Regulation | | Yes | transcriptional | MPVTIKDVAKAAGVSPSTVTRVIQNKSTISDETKK |
| | | | | | | | | regulator | RVRKAMKELNYHPNLNARSLVSSYTQVIGLVLPD |
| | | | | | | | | | DSDAFYQNPFFPSVLRGISQVASENHYAIQIATGKD |
| | | | | | | | | | EKERLNAISQMVYGKRVDGLIFLYAQEEDPLVKLV |
| | | | | | | | | | AEEQFPFLILGKSLSPFIPLVDNGNVQAGFDATEYFI |
| | | | | | | | | | KKGCKRIAFIGGSKKLFVTKDRLTGYEQALKHYKL |
| | | | | | | | | | TTDNNRIYFADEFLEEKGYKFSKRLFKHDPQIDAIIT |
| | | | | | | | | | TDSLLAEGVCNYIAKHQLDVPVLSFDSVNPKLNLA |
| | | | | | | | | | AYVDINSLELGRVSLETILQIINDNKNNKQICYRQLI |
| | | | | | | | | | AHKIIEK |
| 60 | peg.1221 | SP2132 | 0 | 5 | Unknown | | | Band 7 protein | MTEKLINSKPNGVFALILIELTIVLGIFIFIMGVGSEN |
| | | | | | | | | | IFGIIIGPLLIVIAGLAHAGLKVVKPQEALVLTLFGN |
| | | | | | | | | | YTGTIKEPGFYFVNPFSVAVNPANHTRLGQSGDVS |
| | | | | | | | | | TKSPFLGAKSSNDNDVNLEIGKKHISLKVMTLSNS |
| | | | | | | | | | RQKINDCLGNPVEIGIAVTWRVVDTAKAVFNVDN |
| | | | | | | | | | YKEYLSLQCDSSLRNIVRIYPYDVSPNVDTTGDGQ |
| | | | | | | | | | ADEGSLRGSSEIVANRIREEIQSRVEDAGLEILEARI |
| | | | | | | | | | TYLAYAPEIAAVMLQRQQASAIIDARKMIVDGAVG |
| | | | | | | | | | MVEMALERLNEGELVELDEERKAAMVSNLLVVLC |
| | | | | | | | | | GNHDAQPIVNTGSLY |
| 61 | peg.1233 | SP2144 | 0 | 5 | CHO | | | Conserved Protein | MIYSKEIVREWLDEVAERAKDHPEWVDVFERCYT |
| | | | | | metabolism | | | | DTLDNTVEILEDGSTFVLTGDIPAMWLRDSTAQLR |
| | | | | | | | | | PYLHVAKRDALLRQTIAGLVKRQMTLVLKDPYAN |
| | | | | | | | | | SFNIEENWKGHHETDHTDLNGWIWERKYEVDSLC |
| | | | | | | | | | YPLQLSYLLWKETGETSQFDETFVAATKEILHLWT |
| | | | | | | | | | VEQDHKNSPYRFVRDTDRKEDTLVNDGFGPDFAV |
| | | | | | | | | | TGMTWSAFRPSDDCCQYSYLIPSNMFAVVVLGYV |
| | | | | | | | | | QEIFAALNLADSQSVIADAKRLQDEIQEGIKNYAYT |
| | | | | | | | | | TNSKGEKIYAFEVDGLGNASIMDDPNVPSLLAAPY |
| | | | | | | | | | LGYCSVDDEVYQATRRTILSSENPYFYQGEYASGL |
| | | | | | | | | | GSSHTFYRYIWPIALSIQGLTTRDKAEKKFLLDQLV |
| | | | | | | | | | ACDGGTGVMHESFHVDDPTLYSREWFSWANMMF |
| | | | | | | | | | CELVLDYLDIR |
| 62 | peg.1236 | SP2148 | 0 | 5 | Amino acid | | Yes | Arginine dihydrolase | MSSHPIQVFSEIGKLKKVMLHRPGKELENLLPDYL |
| | | | | | metabolism | | | | ERLLFDDIPFLEDAQKEHDAFAQALRDEGIEVLYLE |
| | | | | | | | | | QLAAESLTSPEIRDQFIEEYLDEANIRDRQTKVAIRE |
| | | | | | | | | | LLHGIKDNQELVEKTMAGIQKVELPEIPDEAKDLT |
| | | | | | | | | | DLVESDYPFAIDPMPNLYFTRDPFATIGNAVSLNH |
| | | | | | | | | | MFADTRNRETLYGKYIFKYHPIYGGKVDLVYNRE |
| | | | | | | | | | EDTRIEGGDELVLSKDVLAVGISQRTDAASIEKLLV |
| | | | | | | | | | NIFKKNVGFKKVLAFEFANNRKFMHLDTVFTMVD |
| | | | | | | | | | YDKFTIHPEIEGDLHVYSVTYENEKLKIVEEKGDLA |
| | | | | | | | | | ELLAQNLGVEKVHLIRCGGGNIVAAAREQWNDGS |
| | | | | | | | | | NTLTIAPGVVVVYDRNTVTNKILEEYGLRLIKIRGS |
| | | | | | | | | | ELVRGRGGPRCMSMPFEREEV |
| 63 | peg.1272 | SP2182 | 0 | 5 | unknown | | | | MSKMFKCMCLLVMSVFCMSSISPSLVVFADDSLSA |
| | | | | | | | | | NSKVVSGEAQFENGSSVRFGDTQVNILSDEVLEVV |
| | | | | | | | | | NPDGSVDTIERRADGVYINGAFYMAYQKNEIDLNI |
| | | | | | | | | | SFRSYDPNVWNYVNTIHGNKQANTFANFMTGAGI |
| | | | | | | | | | SYMIGRIGALLGGPWGAIIGGAYFGIQAYQSYLDS |
| | | | | | | | | | QSPYPYYITSTYIHVAQRKWKFITEYYRNSNYTGY |
| | | | | | | | | | VKTVTTYVNF |
| 64 | peg.1277 | SP2187 | 0 | 5 | Regulation | | | M protein trans- | MEKAECGQFSILSFLLQESQTTVKAVMEETGFSKA |
| | | | | | | | | acting positive | TLTKYVTLLNDKALDSGLELTIHSEDENLRLSIGAA |
| | | | | | | | | regulator | TKGRDIRSLFLESAVKYQILVYLFYHQQFLAHQLA |
| | | | | | | | | | QELVISEATLGRHLAGLNQILSEFDLSIQNGRWRGP |
| | | | | | | | | | EHQIRYFYFCLFRKVWSSQEWEGHMQKPERKQEI |
| | | | | | | | | | ANLEEICGASLSVGQKLDLVLWAHISQQRLRVNAC |
| | | | | | | | | | QFQVIEEKMRGYFDNIFYLRLLRKVPSFFAGQHIPL |
| | | | | | | | | | GVEDGEMMIFFSFLLSHRILPLHTMEYILGFGGQLA |
| | | | | | | | | | DLLTQLIQEMKKEELLGDYTEDHVTYELSQLCAQV |
| | | | | | | | | | YLYKGYILQDRYKYQLENRHPYLLMEHDFKETAE |
| | | | | | | | | | EIFHALPAFQQGTDLDKKILWEWLQLIEYMAENGG |
| | | | | | | | | | QHMRIGLDLTSGFLVFSRMAAILKRYLEYNRFITIE |
| | | | | | | | | | AYDPSRHYDLLVTNNPIHKKEQTPVYYLKNDLDM |
| | | | | | | | | | EDLVAIRQLLFT |
| 65 | peg.1386 | SP0045 | 0 | 5 | CHO | | Yes | phosphoribosylformyl | MDKRIFVEKKADFQVKSESLVRELQHNLGLSSLKS |
| | | | | | metabolism | | | glycinamidine | IRIVQVYDVFDLAEDLFAPAEKHIFSEQVTDHVLDE |
| | | | | | | | | synthase | VSVQADLANYAFFAIESLPGQFDQRAASSQEALLL |
| | | | | | | | | | LGSSSDVTVNTAQLYLVNKDIDVTELEAVKNYLLN |
| | | | | | | | | | PVDSRFKDITTGIAKQEFSESDKTIPKLTFFESYTAE |
| | | | | | | | | | DFARYKAEQGMAMEVDDLLFIQDYFKSIGRVPTET |
| | | | | | | | | | ELKVLDTYWSDHCRHTTFETELKHIDFSASKFQKQ |
| | | | | | | | | | LQSTYDKYIAMREELGRSEKPQTLMDMATIFGRYE |
| | | | | | | | | | RANGRLDDMEVSDEINACSVEIEVDVDGVKEPWL |
| | | | | | | | | | LMFKNETHNHPTEIEPFGGAATCIGGAIRDPLSGRS |
| | | | | | | | | | YVYQAMRISGAGDITAPISETRAGKLPQQVISKTAA |
| | | | | | | | | | HGYSSYGNQIGLATTYVREYFHPGFVAKRMELGA |
| | | | | | | | | | VVGAAPKGNVVREKPEAGDVIILLGGKTGRDGVG |
| | | | | | | | | | GATGSSKVQTVESVETAGAEVQKGNAIEERKIQRL |
| | | | | | | | | | FRNGNVTRLIKKSNDFGAGGVCVAIGELADGLEID |
| | | | | | | | | | LNKVPLKYQGLNGTEIAISESQERMAVVVRPEDVD |
| | | | | | | | | | TFVAECNKENIDAVVVATVTEKPNLVMHWNGETI |
| | | | | | | | | | VDLERRFLDTNGVRVVVDAKVVDKDVKLPEERQT |
| | | | | | | | | | SAETLESDTLTVLSDLNHASQKGLQTIFDCSVGRST |
| | | | | | | | | | VNHPLGGRYQLTPTEASVQKLPVQHGVTHTASVIA |
| | | | | | | | | | QGFNPYVAEWSPYHGAAYAVIEATARLVAAGAN |
| | | | | | | | | | WSKARFSYQEYFERMDKQAERFGQPVAALLGSIE |
| | | | | | | | | | AQIQLGLPSIGGKDSMSGTFEELTVPPTLVAFGVTT |
| | | | | | | | | | ADSRKVLSPEFKAVGENIYYIPGQALSAEIDFDLIK |
| | | | | | | | | | KNFAQFEASQADHKVTSASAVKYGGVVESLALAT |
| | | | | | | | | | FGNYIGAEVTLPELKTALTAQLGGFVFTSPEEIAGV |
| | | | | | | | | | EKIGQTKADFTLTVNGVKLDGHKLDSAFQGTLEEV |
| | | | | | | | | | YPTEFTQAKELEEVPAVASDVVIKAKEKVEKPVVY |
| | | | | | | | | | IPVFPGTNSEYDSAKAFEKEGAEVNLVPFVTLNEEA |
| | | | | | | | | | IVKSVETMVDNIDKTNILFFAGGFSAADEPDGSAKF |
| | | | | | | | | | IVNILLNEKVRVAIDSFIARGGLIIGICNGFQALVKS |
| | | | | | | | | | GLLPYGNFEDANSTSPTLFYNDANQHVAKMVETRI |
| | | | | | | | | | ANTNSPWLAGVQVGDIHAIPVSHGEGKFVVTAEEF |
| | | | | | | | | | AELRDNGQIFSQYVDFNGKPSMDSKYNPNGSVHAI |
| | | | | | | | | | EGITSKNGQIIGKMGHSERYEDGLFQNIPGNKDQH |
| | | | | | | | | | LFASAVKHFTGK |
| 66 | peg.1387 | SP0046 | 0 | 5 | CHO | | | glutamine | MTYEVKSLNEECGVFGIWGHPDAAKLTYFGLHSL |
| | | | | | metabolism | | | phosphoribosylpyro- | QHRGQEGAGILSNDQGQLKRHRDMGLLSEVFRNP |
| | | | | | | | | phosphate | ANLDKLTGAGAIGHVRYATAGEASVDNIQPFLFRF |
| | | | | | | | | amidotransferase | HDMQFGLAHNGNLTNAASLKKELEQRGAIFSATS |
| | | | | | | | | | DSEILAHLIRRSHNPSLMGKIKEALSLVKGGFAYIL |
| | | | | | | | | | LFEDKLIAALDPNGFRPLSIGKMANGAVVVSSETC |
| | | | | | | | | | AFEVIGVEWICDLKPGEIVIIDDEGIQYDSYTDDTQL |
| | | | | | | | | | AICSMEYIYFARPDSNIHGVNVHTARKRMGAQLAR |
| | | | | | | | | | EFKHEADIVVGVPNSSLSAAMGFAEESGLPNEMGL |
| | | | | | | | | | IKNQYTQRTFIQPTQELREQGVRMKLSAVSGVVKG |
| | | | | | | | | | KRVVMVDDSIVRGTTSRRIVQLLKEAGATEVHVAI |
| | | | | | | | | | GSPALAYPCFYGIDIQTRQELIAANHTVEETRQIIGA |
| | | | | | | | | | DSLTYLSIDGLIESIGIETDAPNGGLCVAYFDGDYPT |
| | | | | | | | | | PLYDYEEDYRRSLEEKTSFYK |
| 67 | peg.1419 | SP0082 | 0 | 5 | adhesin | | | cell wall surface | MKFNPNQRYTRWSIRRLSVGVASVVVASGFFVLV |
| | | | | | | | | anchor family protein | GQPSSVRADVVNPTPGQVLPEETSGTKEGDLSEKP |
| | | | | | | | | | GDTVLTQAKPEGVTGNTNSLPTPTERTEVSEETNSS |
| | | | | | | | | | SLDTLFEKDEEAQKNPELTDVLKEAVDTDDVDGT |
| | | | | | | | | | QASPAETTPEQVKGGVKENTKDSIDVPAAYLEKAE |
| | | | | | | | | | GKGPFTAGVNQVIPYELFAGDGMLTRLLLKASDN |
| | | | | | | | | | APWSDNGTAKNPALPPLEGLTKGKYFYEVDLNGN |
| | | | | | | | | | TVGKQGQALIDQLRANGTQTYKATVKVYGNKDG |
| | | | | | | | | | KADLTNLVATKNVDININGLVAKETVEKAVKDNV |
| | | | | | | | | | KDSIDVPAAYLEKAKGEGPFTAGVNHVIPYELFAG |
| | | | | | | | | | DGMLTRLLLKASDKAPWSDNGDAKNPALSPLGEN |
| | | | | | | | | | VKTKGQYFYQVALDGNVAGKEKQALIDQFRANG |
| | | | | | | | | | TQTYSATVNVYGNKDGKPDLDNIVATKKVTINING |
| | | | | | | | | | LISKETVQKAVADNVKDSIDVPAAYLEKAKGEGPF |
| | | | | | | | | | TAGVNHVIPYELFAGDGMLTRLLLKASDKAPWSD |
| | | | | | | | | | NGDAKNPALSPLGENVKTKGQYFYQVALDGNVV |
| | | | | | | | | | GKEKQALIDQFRANGTQTYSATVNVYGNKDGKPD |
| | | | | | | | | | LDNIVATKKVTININGLISKETVQKAVADNVKDSID |
| | | | | | | | | | VPAAYLEKAKGEGPFTAGVNHVIPYELFAGDGML |
| | | | | | | | | | TRLLLKASDKAPWSDNGDAKNPALSPLGENVKTK |
| | | | | | | | | | GQYFYQVALDGNVVGKEKQALIDQFRANGTQTYS |
| | | | | | | | | | ATVNVYGNKDGKPDLDNIVATKKVTININGLISKE |
| | | | | | | | | | TVQKAVADNVKDSIDVPAAYLEKAKGEGPFT AGV |
| | | | | | | | | | NHVIPYELFAGDGMLTRLLLKASDKAPWSDNGDA |
| | | | | | | | | | KNPALSPLGENVKTKGQYFYQVALDGNVAGKEK |
| | | | | | | | | | QALIDQFRANGTQTYSATVNVYGNKDGKPDLDNI |
| | | | | | | | | | VATKKVTIKINVKETSDTANGSLSPSNSGSGVTPM |
| | | | | | | | | | NHNHATGTTDSMPADTMTSSTNTMAGENMAASA |
| | | | | | | | | | NKMSDTMMSEDKAMLPNTGETQTSMASIGFLGLA |
| | | | | | | | | | LAGLLGGLGLKNKKEEN |
| 68 | peg.1433 | SP0097 | 0 | 5 | unknown | | | | MKQEWFESNDFVKTTSKNKPEEQAQEVADKAEET |
| | | | | | | | | | IADFDTPIEKNTQLEEEVSQAEVELESQQEEKIEAPE |
| | | | | | | | | | DSEARTGIEEKKASNSTEEEPDLSKETEKVTIAEES |
| | | | | | | | | | QEALPQQKATTKEPLLISKSLESPYIPDQAPKSRDK |
| | | | | | | | | | WKEQVLDFWSWLVEAIKSPTSKLETSITHSYTAFL |
| | | | | | | | | | LLILFSASSFFFSIYHIKHAYYGHIASINSRFPEQLAP |
| | | | | | | | | | LTLFSIVSILVATTLFFFSFLLGSFVVRRFIHQEKDW |
| | | | | | | | | | TLDKVLQQYSQLLAIPIFLTAIASFFAFFDSLRFTAL |
| | | | | | | | | | LCVISIGIILLASLHIITRPSQASETDSFYQLFLSVLVN |
| | | | | | | | | | GVIILLFFVAEVALIGDYLRILAFL |
| 69 | peg.1437 | SP_0101 | 0 | 5 | transport | | | Major Facilitator | MKKQSLFFVPGIILIGVSLRTPFTVLPIILGNISQGLE |
| | | | | | | | | Superfamily | VEVSSLGVLTSLPLLMFTLFSPFSTQLAQKIGLEHLF |
| | | | | | | | | | TYSLFFLTIGSLIRLINLPLLYLGTLMVGASVAVINV |
| | | | | | | | | | LLPSLIQANQPKKIGFLTTLYVTSMGIATALASYLA |
| | | | | | | | | | VPITQASSWKGLILLLTLLCLATFLVWLPNHRYNH |
| | | | | | | | | | RLAPQTKQKSQIKVMRNKQVWAIIIFSGFQSLIFYT |
| | | | | | | | | | AMTWLPTMSIHAGLSSHEAGLLTSILSLISIPFSMTIP |
| | | | | | | | | | SLTTSLSTRNRQLMLTLVSLAGVVGISMLFFPINNFI |
| | | | | | | | | | YWLAIHLLIGTATSALFPYLMVNFSLKTSAPEKTA |
| | | | | | | | | | QLSGLSQTGGYILAAFGPTLFGYSFDLFHSWVPSV |
| | | | | | | | | | AALLLIDILMTVALFTVDRADKIL |
| 70 | peg.1486 | n/a | 0 | 5 | unknown | | | | MKIKEQTRKLAAGCSKHCFEVADRTDEVSSKRCFE |
| | | | | | | | | | VVDRTDEVSNIYTAK |
| 71 | peg.1515 | SP_0177 | 0 | 5 | Metabolism | | | riboflavin synthase, | MFTGIIEEIGKVERIQKDSRNCKLSIKASKILTDIHLG |
| | | | | | | | | subunit alpha | DSIAVNGICLTVTHFNHQSFTVDVMNETWSRTALT |
| | | | | | | | | | LLKHGSEVNLERALSVNGRLGGHVVTGHIDGTGKI |
| | | | | | | | | | SSIKKDDNAVWYQINTQKEILDLIVEKGSITIDGISL |
| | | | | | | | | | TVAKVSKVNFSVSVIPHTLEQTILKSKQVGSTVNLE |
| | | | | | | | | | NDILGKYVQKLMDNSPKSEISKELLYQNGF |
| 72 | peg.1580 | SP_0247 | 0 | 5 | Regulation | | | regulator | MNQDRNKLLSKIAYLYYIENLNQSQIAAKLGIYRT |
| | | | | | | | | | SISRMLTEARNAGIVKIEIENFDTNMFKLENYVKEK |
| | | | | | | | | | YGLESLEIIPNEFDDNPTILSERISQVAAGVLRNLID |
| | | | | | | | | | DNMKIGFSWGKSLSNLVDLIHSKSVRNVHFYPLAG |
| | | | | | | | | | GPSHIHAKYHVNTLIYEMSRKFHGECTFMNATIVQ |
| | | | | | | | | | ENKLLADGILQSRYFENLKNSWKDLDIAVVGIGDF |
| | | | | | | | | | SNKGKHQWLDMLTEDDFKELTKVKTVGEICCRFF |
| | | | | | | | | | DSKGKEVYENLQERTIAISLEDLKNIPQSLAVAYGD |
| | | | | | | | | | TKVSSILSVLRANLVNHLITDKNTILKVLEEDGDLT |
| | | | | | | | | | FREILGE |
| 73 | peg.1643 | n/a | 0 | 5 | CHO | | | malate | MVENVGQLAIEQAKANGGKLEVVSKVTVNNRHD |
| | | | | | metabolism | | | dehydrogenase | LSIAYSPGVASVSSAIAENADLAYTLTTKKNTVAV |
| | | | | | | | | (Oxaloacetate- | VSDGTAVLGLGDIGPAAAMPVMEGKAALFKRFAD |
| | | | | | | | | decarboxylating) | VDAVPIVLDTKDPEEIIRIVKAMAPTFGGVNLEDIS |
| | | | | | | | | | APRCFEIEQRLIEECDIPIFHDDQHGTAIVVLAGLFN |
| | | | | | | | | | SLKLAQKELDKVKIVVNGGGSAGLSITRKLLAAGA |
| | | | | | | | | | TDVTVVDRFGIISEEDHDKLAPHHQDIAKVTNRRL |
| | | | | | | | | | ASGSLADALEDADVFLGVSAPGALNPEWIAKMND |
| | | | | | | | | | KPIIFAMANPTPEIFPDEALAAGAYIVGTGRSDFPN |
| | | | | | | | | | QINNVLAFPGIFRGALDARAKKITVEMQIAAAKGIA |
| | | | | | | | | | SLIPDSELSPTNIIPDPFQEGVAKVVAKSVSDAVKD |
| 74 | peg.1673 | SPO324 | 0 | 5 | CHO | | | PTS System | MYPALKKHYGEDQEGFYQALEENCEFYNTNPHFL |
| | | | | | transport | | | | PFITSLHLVMLENGRPTKETRSIKMALMGPLAGIGD |
| | | | | | | | | | SLSQFCLAPLFSTIAASFAQEGLVVGPILFFLAMNTI |
| | | | | | | | | | LTAIKLSTGLYGYKLGTTVIDKLSEQMATISRIANII |
| | | | | | | | | | GVTVIAGLAATSVKIMVPITFAAGEVKADAKQSIV |
| | | | | | | | | | SIQGMLDKVAPALLPALFTLLVYYLIKEKKWTTYK |
| | | | | | | | | | LVILTVIIGIIGSWLKIIA |
| 75 | peg.1719 | SPO374 | 0 | 5 | unknown | | Yes | NA | MSKKRRNRHKKEGQEPQFDFDEAKELTVGQAIRK |
| | | | | | | | | | NEEVEAGVLPEDSILDKYVKQHRDEIEADKFATRQ |
| | | | | | | | | | YKKEEFVETQSLDDLIQEMREAVEKSEASSEEVPSS |
| | | | | | | | | | EDILLPLPLDDEEQGLDPLLLDDENPTEMTEEVEEE |
| | | | | | | | | | QNLSRLDQEDSEKKSKKGFILTVLALVSVIICVSAY |
| | | | | | | | | | YVYRQVARSTKEIETSQSTTANQSDVDDFNTLYDA |
| | | | | | | | | | FYTNSNKTALKNSQFDKLSQLKTLLDKLEGSREHT |
| | | | | | | | | | LAKSKYDSLATQIKAIQDVNAQFEKPAIVDGVLDT |
| | | | | | | | | | NAKAKSDAKFTDIKTGNTELDKVLDKAISLGKSQQ |
| | | | | | | | | | TSTSSSSSSQTSSSSSSQASSNTTSEPKPSSSNDTRSS |
| | | | | | | | | | RSEVNMGLSSAGVAVQRSASRVAYNQSAIDDSNN |
| | | | | | | | | | SAWDFADGVLEQILATSRSRGYITGDQYILERVNIV |
| | | | | | | | | | NGNGYYNLYKPDGTYLFTLNCKTGYFVGNGAGH |
| | | | | | | | | | ADDLDY |
| 76 | peg.1726 | SPO38O | 0 | 5 | bacteriocin | | | | VTIRTTHTYEYQYSLLFGDAGYLWLLLHLFSISKN |
| | | | | | | | | | QYYLQLANVTAKKLIENYDTLEEIDFALGKSGVLL |
| | | | | | | | | | SLIKYYQFTNDNTLKTFIHNSIWGNLSLFPTKRYSQ |
| | | | | | | | | | RKHFRL |
| 77 | peg.1825 | SP0482 | 0 | 5 | Transport | | | UPF0397 protein | MEIKFTIKQVVAVGIGAALFVVIGMINIPTPVPNTSI |
| | | | | | | | | | QLQYAVQALLSIIFGPIIGLLVGLIGHAIKDSLAGYG |
| | | | | | | | | | LWWTWIIASGLFGLVVGLFRKYVRVINGVFDWKD |
| | | | | | | | | | ILIFNLIQLLANALVWGVLAPLGDVVIYQEAAEKVF |
| | | | | | | | | | AQGIVAGIANGVSVAIAGTLLLLAYAGTQTRAGSL |
| | | | | | | | | | KKD |
| 78 | peg.1869 | SP0539 | 0 | 5 | Bacteriocin | | | | MNTKMMEQFHEMDITMLSSIEGGKNNWQTNVLE |
| | | | | | | | | | GGGAAFGGWGLGTAICAASGVGAPFMGACGYIGA |
| | | | | | | | | | KFGVDLWAGVTGATGGF |
| 79 | peg.1908 | SP_0575 | 0 | 5 | regulation | | | type iii restriction | LLSTGKYIGEGFDLPQLDTLILAAPFSWKNNLIQYS |
| | | | | | | | | protein res subunit | GRIHRNYKDKSLVRIFDYVDIHVPYLEKMFQKRQV |
| | | | | | | | | | AYRKMDYRAIEGEEKQFVYVDSRYEKVLIEDLAG |
| | | | | | | | | | ERQECLLILPYVHQTKLMNFLKEFRISQIEICIPETV |
| | | | | | | | | | ANKAWLDQLKSQKIKVSFTQSKIVTPILLVNKTIV |
| | | | | | | | | | WYDAMPLLGKVDEMTILRLESASIVSELVAGLR |
| 80 | peg.1937 | SP0607 | 0 | 5 | Amino acid | | | amino acid AbC | MESILEVLTPDNLVFIFKGFGLTLYISLIAIILSTIIGT |
| | | | | | transport | | | transporter | VLAVMRNGKNPILRIISSIYIEFVRNVPNLLWIFTIFL |
| | | | | | | | | | VFKMKSTPAGITAFTLFTSAALAEIIRGGLNAVDKG |
| | | | | | | | | | QYEAGMSQGFTSAQILYYIILPQAIRKMLPAIISQFV |
| | | | | | | | | | TVIKDTSLLYSVIALQELFGASQILMGRYFEPEQVF |
| | | | | | | | | | SLYILIALIYFSFNLAISSLSHMLAKRWQQAAE |
| 81 | peg.1949 | SP0620 | 0 | 5 | Amino acid | | | ABC transporter | MKKFSLLLAILPFLVACGNQATPKETSAQKTIVLAT |
| | | | | | transport | | | substrate-binding | AGDVPPFDYEDKGNLTGFDIEVLKAVDEKLSDYEI |
| | | | | | | | | protein | QFQRTAWESIFPGLDSGHYQAAANNLSYTKERAE |
| | | | | | | | | | KYLYSLPISNNPLVLVSNKKNPLTSLDQIAGKTTQE |
| | | | | | | | | | DTGTSNAQFINNWNQKHTDNPATINFSGEDIGKRIL |
| | | | | | | | | | DLANGEFDFLVFDKVSVQKIIKDRGLDLSVVDLPS |
| | | | | | | | | | ADSPSNYIVFSSDQKEFKEQFDKALKELYQDGTLE |
| | | | | | | | | | KLSNTYLGGSYLPDQSQLQ |
| 82 | peg.1997 | SP0667 | 0 | 5 | adhesin | CbpL | | surface protein | MNKRLFLKMSLVTLPILALFSQPVLAEENIHFSSCK |
| | | | | | | | | | EAWANGYSDIHEGEPGYSAKLDRDHDGVACELKN |
| | | | | | | | | | APKGAFKAKQSTVAQTNTSSATTSGWVEQDGAW |
| | | | | | | | | | YYFDENGNPVKNAWQGNYYLKSDGKMAQGEWI |
| | | | | | | | | | YDSSYQAWYYLTSDGSYAYSTWQGNYYLKSDGK |
| | | | | | | | | | MAANEWVDGGRYYVGADGVWKEGQASTASSSN |
| | | | | | | | | | DSNSEYSAALGKAKSYNSLFHMSKKRMYRQLTSD |
| | | | | | | | | | FDKFSNDAAQYAIDH* |
| 83 | peg.2043 | SP_0717 | 0 | 5 | Nucleic | | | 4-methyl-5-beta- | MTSLKLLKEKAPLVICITNDVVKNFTANGLVALGA |
| | | | | | acid | | | hydroxy ethylthiazole | SPAMSEFPADLEDLLKYAGGLLINIGTLTDENWKL |
| | | | | | metabolism | | | kinase | YQAALKIAEKYNVPAVLDPVACGAGEYRKKVAD |
| | | | | | | | | | DLINNYKLAAIRGNAGEIASLVGIDVASKGVDSAG |
| | | | | | | | | | VDNIDEIALAANEKFNIPIVVTGEVDAIAVNGEVVT |
| | | | | | | | | | IHNGSAMMPKVIGTGCLLGAVVASFIGLEKGQELK |
| | | | | | | | | | SLETAMLVYNIAGEIAEKRPNGHLPGTFKAEFINAL |
| | | | | | | | | | YEITDEDVKEFKRVK |
| 84 | peg.2093 | SP_0770 | 0 | 5 | Metal | | Yes | ABC transporter | MSILEVKNLSHGFGDRAIFEDVSFRLLKGEHIGLVG |
| | | | | | transport | | | | ANGEGKSTFMSIVTGKMLPDEGKVEWSKYVTAGY |
| | | | | | | | | | LDQHSVLAERQSVRDVLRTAFDELFKAEARINDLY |
| | | | | | | | | | MKMAEDGADVDALMEEVGELQDRLESRDFYTLD |
| | | | | | | | | | AKIDEVARALGVMDFGMDTDVTSLSGGQRTKVLL |
| | | | | | | | | | AKLLLEKPDILLLDEPTNYLDAEHIDWLKRYLQNY |
| | | | | | | | | | ENAFVLISHDIPFLNDVINIVYHVENQQLTRYSGDY |
| | | | | | | | | | YQFQEVYAMKKSQLEAAYERQQKEIADLKDFVAR |
| | | | | | | | | | NKARVATRNMAMSRQKKLDKMDIIELQSEKPKPS |
| | | | | | | | | | FDFKPARTPGRFIFQAKNLQIGYDRPLTKPLNLTFE |
| | | | | | | | | | RNQKVAIIGANGIGKTTLLKSLLGIISPIAGEVERGD |
| | | | | | | | | | YLELGYFEQEVEGGNRQTPLEAVWNAFPALNQAE |
| | | | | | | | | | VRAALARCGLTTKHIESQIQVLSGGEQAKVRFCLL |
| | | | | | | | | | MNRENNVLVLDEPTNHLDVDAKDELKRALKEYR |
| | | | | | | | | | GSILMVCHEPDFYEGWIDQIWDFNNLT |
| 85 | peg.2140 | SP0824 | 0 | 5 | Amino acid | | | ABC transporter, | MNFSFLPKYLPYFNYGAVVTILISICVIFLGTILGVV |
| | | | | | transport | | | permease protein | LAFGQRSKFKPLVWLANLYVWIFRGTPMMVQIMI |
| | | | | | | | | | AFALMHINAPTIQIGILGVDFSRLIPGILIISMNSGAY |
| | | | | | | | | | VSETVRAGINAVPKGQLEAAYSLGIRPKNAMRYVI |
| | | | | | | | | | LPQAVKNILPALGNEFITIIKDSSLLSAIGVMELWNG |
| | | | | | | | | | ATTVSTTTYLPLTPLLFAAFYYLIMTSILTVALKAFE |
| | | | | | | | | | KHMGQGDKK |
| 86 | peg.2160 | SP0843 | 0 | 5 | Nucleic | | | Catalyzes a reversible | MKLNKYIDHTLLKQDAKKKQIDSLLSEAREYGFAS |
| | | | | | acid | | | aldol reaction | VCVNPTWVEHAKKGLEGTDVKVCTVVGFPLGATT |
| | | | | | metabolism | | | between acetaldehyde | SAVKAFETKEAIQNGADEIDMVINVGALKSGNLAL |
| | | | | | | | | and D-glyceraldehyde | VESDIRAVVEASGDKLVKVIIEACLLTDQEKVVVC |
| | | | | | | | | 3-phosphate to | QLAQKAGADFVKTSTGFSTGGATIADVTLMRETV |
| | | | | | | | | generate | GSDMGVKAAGGARSYADALAFVEAGATRIGTSAG |
| | | | | | | | | 2-deoxy-D-ribose | VAILKGELADGDY |
| | | | | | | | | 5-phosphate (By | |
| | | | | | | | | similarity) | |
| 87 | peg.2177 | SP0858 | 0 | 5 | unknown | | | Membrane | MTELAKQLLELTYIVIGCQFLHTAYCSYKDKTNPV |
| | | | | | | | | | RLGTSAFWTLLSITFIGGSYMPNMSIGIIVILLSLLTL |
| | | | | | | | | | FKQVRIGTLPSLDEMKANIESNRLKNKIFIPVMLMA |
| | | | | | | | | | ILALVLAQMIPEFSKISISLAALFATISVLVITNSHPK |
| | | | | | | | | | SLLSENNRMTQQVSTSGIVPQLLGALGAIFTVAGV |
| | | | | | | | | | GDVISHLISGIVPSDSRFIGVLAYVLGMVLFTMIMG |
| | | | | | | | | | NAFAAFTVITAGVGVPFVFALGANPIVAGALAMTA |
| | | | | | | | | | GYCGTLLTPMAANFNALPAALMDMKDQNGVIKA |
| | | | | | | | | | QAGVALVMIVIHIFLMYFLAF |

*in van Opijnen and Camilli (2012) Genome Res. 22(12): 2541-2551
**Protein functions were predicted with the eggNOG pipeline, using HMMR on the bacteria database.
https://academic.oup.eom/mbe/article/34/8/2115/3782716

TABLE 2

| | | | | | | | Identified | | |
|---|---|---|---|---|---|---|---|---|---|
| | | | Mean | Number | | | in Murine | | |
| SEQ | BHN97 | TIGR4 | Proba- | of | Functional | | Naso- | | |
| ID | Locus | Locus | bility of | Donors | Classi- | | pharynx | | |
| NO: | ID | ID | Infection | Infected | fication | Name | TnSeq* | KEGG prediction** | BHN97 protein sequence |
| 88 | peg.0391 | SP_1282 | 0.04125 | 8 | transport | | | abc transporter atp- | MHYEHSRKGNHMIKINHLTITQNKDLRDLVSDLS |
| | | | | | | | | binding protein | MTIQDGEKVAIIGEEGNGKSTLLKILMGEALSDFTI |
| | | | | | | | | | KGNIQSDYQSLAYIPQKLPEELKKKTLHDYFFLDSI |
| | | | | | | | | | DLDYSILYRLAEELHFDSNRFASDQKIGNLSGGEAL |
| | | | | | | | | | KIQLIHELAKPFEILFLDEPSNDLDLETVDWLKGQIQ |
| | | | | | | | | | KTRQTVIFISHDEDFLSETADTIVHLRLVKHRKEAE |
| | | | | | | | | | TLVEHLDYDSYSEQRKANFAKQSQQAANNQRAY |
| | | | | | | | | | DKTMEKHRRVKQNVETALRATKDSTAGRLLAKK |
| | | | | | | | | | MKTVLSQEKRYEKTAQSMTQKPLEEEQIQLFFSDI |
| | | | | | | | | | QPLPASKVLVQLEKENLSIDDRVLVQKLQLTVRGQ |
| | | | | | | | | | EKIGIIGPNGVGKSTLLAKLKQLLNDKREISLGFMP |
| | | | | | | | | | QDYHKKLQLDLSPIAYISKTGEKEELQKIQSHLASL |
| | | | | | | | | | NFSYPEMQHQIRSLSGGQQGKLLLLDLVLRKPNFL |
| | | | | | | | | | LLDEPTRNFSPTSQPQIRKLFATYPGGLITVSHDRRF |
| | | | | | | | | | LKEICSIIYRMTEHGLKLVNLEDL |
| 89 | peg.0404 | n/a | 0.055 | 6 | unknown | | | Transcriptional | MENFGAVLKDIRISKNFRLKDLSCNEISESTISRFEN |
| | | | | | | | | regulator | GITKLSINHFYILLNRLGISFSEFEELVHCYYSKKEC |
| | | | | | | | | | LFEELEHAVNSSDIFLLQELVDKIELKQKQEKSLCN |
| | | | | | | | | | YHIKLIAEQQINRLANLPYNSSKCNELIKYLLSVDT |
| | | | | | | | | | WMEYELKLFYNSVFFMNTRTISLLYRIVIKKTRYFL |
| | | | | | | | | | KTNTGTHRIIPLYLFNLKLLLKNNLLGSAQFFIDDL |
| | | | | | | | | | ENLLTRQGYYFEKNYLLFLKGIYLIKTNQIELGKKE |
| | | | | | | | | | CSKAMRIFKEYNDSDTINELNQKFKLDLTI |
| 90 | peg.1576 | SP_0234 | 0.055 | 6 | Metal | | | ABC transporter | MKKKWMYYAACSSNESADDSSSDKGDGGSLVVY |
| | | | | | transport | | | | SPNSEGLIGATIPAFEEKYGIKIELIQAGTGELFKKLE |
| | | | | | | | | | SEKEVPVADVIFGGSYTQYATHGELFENYTSKEND |
| | | | | | | | | | NVIKEYQNTTGYSTPYTLDGSVLIVNPDLTKGMNI |
| | | | | | | | | | EGYNDLLKPELKGKIATADPANSSSAFAQLTNMLQ |
| | | | | | | | | | AQGGYKDDKAWSYVKDLFTLIDGKIGSSSSSVYK |
| | | | | | | | | | AVADGEMAVGLSYEDPAVKLLNDGANIKVVYPKE |
| | | | | | | | | | GTVFLPASAAIVKKAKNMENAKKFIDFIISQEVQDT |
| | | | | | | | | | LGTTTTNRPVRKNAKTSENMKPIDKIKTLTEDYDY |
| | | | | | | | | | VIKNKSDIVKKYNEVFTDIQSKQ |
| 91 | peg.1618 | SP_0287 | 0.055 | 6 | transport | | | Xanthine uracil | MDKLFKLKENGTDVRTEVLAGLTTFFAMSYILFVN |
| | | | | | | | | vitamin C permease | PQILSQTGMPAQGVFLATIIGAVAGTLMMAFYANL |
| | | | | | | | | | PYAQAPGMGLNAFFTFTVVFGLGYSWQEALAMVF |
| | | | | | | | | | ICGIISLVITLTNVRKMIIESIPNALRSAISAGIGVF |
| | | | | | | | | | LAYVGIKNAGLLKFTIDPGNYTVVGEGADKAQATIAA |
| | | | | | | | | | NSSAVPGLVSLNNPAVLVALAGLAITIFFVIKGIKG |
| | | | | | | | | | GIILSILTTTVLAIAVGLVDLSSIDFANNHVGAAFED |
| | | | | | | | | | LKTIFGAALGSEGLGALVSDTARLPETLMAILAFSL |
| | | | | | | | | | TDIFDTIGTLIGTGEKVGIVATNGENHQSAKLDKAL |
| | | | | | | | | | YSDLIGTTVGAIAGTSNVTTYVESAAGIGAGGRTG |
| | | | | | | | | | LTALVVAICFAISSFFSPLLAIVPTAATAPILIIVGIM |
| | | | | | | | | | MLGSLKNIHWDDMSEAVPAFFTSIFMGFSYSITQGI |
| | | | | | | | | | AVGFLTYTLTKLVKGQVKDVHAMIWILDALFILNY |
| | | | | | | | | | ISMAL |
| 92 | peg.1992 | SP_0662 | 0.055 | 6 | regulation | | | Histidine kinase | MKRSSLLVRMVISIFLVFLILLALVGTFYYQSSSSAI |
| | | | | | | | | | EATIEGNSQTTISQTSHFIQSYIKKLETTSTGLTQQT |
| | | | | | | | | | DVLAYAENPSQDKVEGIRDLFLTILKSDKDLKTVV |
| | | | | | | | | | LVTKSGQVISTDDSVQMKTSSDMMAEDWYQKAIH |
| | | | | | | | | | QGAMPVLTPARKSDSQWVISVTQELVDAKGANLG |
| | | | | | | | | | VLRLDISYETLEAYLNQLQLGQQGFAFIINENHEFV |
| | | | | | | | | | YHPQHTVYSSSSKMEAMKPYIETGQGYTPGHKSY |
| | | | | | | | | | VSQEKIAGTDWTVLGVSSLEKLDQVRSQLLWTLL |
| | | | | | | | | | GASVTSLLVCLCLVWFSLKRWIAPLKDLRETMLEI |
| | | | | | | | | | ASGAQNLRAKEVGAYELREVTRQFNAMLDQIDQL |
| | | | | | | | | | MVAIRSQEETTRQYQLQALSSQINPHFLYNTLDTII |
| | | | | | | | | | WMAEFHDSQRVVQVTKSLATYFRLALNQGKDLIC |
| | | | | | | | | | LSDEINHVRQYLFIQKQRYGDKLEYEINENVAFDN |
| | | | | | | | | | LVLPKLVLQPLVENALYHGIKEKEGQGHIKLSVQK |
| | | | | | | | | | QDSGLVIRIEDDGVGFQDAGDSSQSQLKRGGVGLQ |
| | | | | | | | | | NVDQRLKLHFGANYQMKIDSRPQKGTKVEIYINRI |
| | | | | | | | | | ETS |
| 93 | peg.0287 | SP_1175 | 0. | 9 | adhesin | His- | | (Histidine triad) | MKINKKYLVGSAAALILSVCSYELGLYQARTVKEN |
| | | | 055555556 | | | tidine | | protein | NRVSYIDGKQATQKTENLTPDEVSKREGINAEQIVI |
| | | | | | | triad | | | KITDQGYVTSHGDHYHYYNGKVPYDAIFSEELLM |
| | | | | | | protein | | | KDPNYKLKDEDIVNEVKGGYVIKVDGKYYVYLKD |
| | | | | | | | | | AAHADNVRTKEEINRQKQEHSQHREGGTPRNDGA |
| | | | | | | | | | VALARSQGRYTTDDGYIFNASDIIEDTGDAYIVPHG |
| | | | | | | | | | DHYHYIPKNELSASELAAAEAFLSGRGNLSNSRTY |
| | | | | | | | | | RRQNSDNTSRTNWVPSVSNPGTTNTNTSNNSNTNS |
| | | | | | | | | | QASQSNDIDSLLKQLYKLPLSQRHVESDGLVFDPA |
| | | | | | | | | | QITSRTARGVAVPHGDHYHFIPYSQMSELEERIARII |
| | | | | | | | | | PLRYRSNHWVPDSRPEQPSPQPTPEPSPGPQPAPNL |
| | | | | | | | | | KIDSNSSLVSQLVRKVGEGYVFEEKGISRYVFAKD |
| | | | | | | | | | LPSETVKNLESKLSKQESVSHTLTAKKENVAPRDQ |
| | | | | | | | | | EFYDKAYNLLTEAHKALFENKGRNSDFQALDKLL |
| | | | | | | | | | ERLNDESTNKEKLVDDLLAFLAPITHPERLGKPNSQ |
| | | | | | | | | | IEYTEDEVRIAQLADKYTTSDGYIFDEHDIISDEGDA |
| | | | | | | | | | YVTPHMGHSHWIGKDSLSDKEKVAAQAYTKEKGI |
| | | | | | | | | | LPPSPDADVKANPTGDSAAAIYNRVKGEKRIPLVR |
| | | | | | | | | | LPYMVEHTVEVKNGNLIIPHKDHYHNIKFAWFDD |
| | | | | | | | | | HTYKAPNGYTLEDLFATIKYYVEHPDERPHSNDG |
| | | | | | | | | | WGNASEHVLGKKDHSEDPNKNFKADEEPVEETPA |
| | | | | | | | | | EPEVPQVETEKVEAQLKEAEVLLAKVTDSSLKANA |
| | | | | | | | | | TETLAGLRNNLTLQIMDNNSIMAEAEKLLALLKGS |
| | | | | | | | | | NPSSVSKEKIN |
| 94 | peg.1217 | SP_2128 | 0.0625 | 8 | CHO | | | Transketolase | MILSKNREDELRKFATNIRLNTLRTLNHLGFGHYG |
| | | | | | metabolism | | | | GSLSIVEVLAVLYGEIMPMTPEIFAARDRDYFILSK |
| | | | | | | | | | GHGGPALYSTLYLNGFFDKEFLYSLNTNGTKLPSH |
| | | | | | | | | | PDRNLTPGIDMTTGSLGQGISVATGLAYGQRIRKSP |
| | | | | | | | | | FYTYAIVGDGELNEGQCWEAIQFASHQQLSNLIVF |
| | | | | | | | | | VDDNKKQLDGFTKDICNPGDFVEKFSAFGFESIRV |
| | | | | | | | | | KGSDIREIYEGIVQLKQSNNSSPKCIVLDTIKGQGV |
| | | | | | | | | | QELEEMKSNHHLRPTVEERQMLTSVVERLSQELEE |
| | | | | | | | | | TE |
| 95 | peg.1230 | SP_2142 | 0.0625 | 8 | CHO | | Yes | hydrolase, family 20 | MVRFIGLSPKQTQAIEVLKGHISLPDVEVAVTQSDQ |
| | | | | | metabolism | | | | ASISIEGEEGHYQLTYRKPHQLYRALSLLVTVLAEA |
| | | | | | | | | | DKVEIEEQAAYEDLAYMVDCSRNAVLNVASAKQ |
| | | | | | | | | | MIEVLALMGYSTFELYMEDTYQIEGQPYFGYFRGA |
| | | | | | | | | | YSAEELQEIEAYAQQFDMTFVPCIQTLAHLSAFVK |
| | | | | | | | | | WGVKEVQELRDVEDILLIGEEKVYDLIDGMFATLS |
| | | | | | | | | | KLKTRRVNIGMDEAHLVGLGRYLILNGVVDRSLL |
| | | | | | | | | | MCQHLERVLDIADKYGFHCQMWSDMFFKLMSAD |
| | | | | | | | | | GQYDRDVEIPEETRVYLDRLKDRVTLVYWDYYQD |
| | | | | | | | | | SEEKYNRNFRNHHKISHDLAFAGGAWKWIGFTPH |
| | | | | | | | | | NHFSRLVAIEANKACRANQIKEVIVTGWGDNGGET |
| | | | | | | | | | AQFSILPSLQIWAELSYRNDLDGLSAHFKTNTGLTV |
| | | | | | | | | | EDFMQIDLANLLPDLPGNLSGINPNRYVFYQDILCP |
| | | | | | | | | | ILDQHMTPEQDKPHFAQAAETLANIKEKAGNYAY |
| | | | | | | | | | LFETQAQLNAILSSKVDVGRRIRQAYQADDKESLQ |
| | | | | | | | | | QIARQELPELRSQIEDFHALFSHQWLKENKVFGLD |
| | | | | | | | | | TVDIRMGGLLQRIKRAESRIEVYLAGQLDRIDELEV |
| | | | | | | | | | EILPFTDFYADKDFAATTANQWHTIATASTIYTT |
| 96 | peg.1426 | SP_0090 | 0.0625 | 8 | transport | | | Binding-protein- | MKKFSKTLRDNWIFLLMVLPGTLWLILFFYIPVFG |
| | | | | | | | | dependent transport | NVVAFKDYHMTSNGFIDSIINSKWVGLDNFRFLFSS |
| | | | | | | | | systems, inner | RDAFIITRNTVLYNLGFIFLGLVVSVGIAIILSELRS |
| | | | | | | | | membrane | KRMVKIFQTSMLFPYFLSWVIISFFTDAFLNIDKGVF |
| | | | | | | | | component | NHLLESLGLKEVNFYADLGIWPYLLLFLGIWKGFG |
| | | | | | | | | | YSSVMYYATIMGIDPTYYEAATVDGASKWQRIRN |
| | | | | | | | | | VTIPQLTPLVTVLTILAVGNIFRADFGLFYQIPHNAG |
| | | | | | | | | | QLYNVTNVLDVYVFNGLTQTADIGMAAAAGLYQ |
| | | | | | | | | | SVVGLILVILSNLLARRVDPNSALF |
| 97 | peg.0516 | n/a | 0.066 | 5 | unknown | | | NA | MKLNKLNFLKENIRNLYSSGVIYLSLLISFIPPILLTF |
| | | | | | | | | | FILKTQGTSLGIKHISNFYAMLGMLMAVIHANRVIS |
| | | | | | | | | | RDFSHNTVSLFYNQQKNRMIYVLSNFLYAISVSIIY |
| | | | | | | | | | ALNGIVLLVIVSKLGIPGDLGLDFIVAIVVNTILLVL |
| | | | | | | | | | FYFLLSYIFYLYKLKSGLVFGILVALLLFIPNILNTM |
| | | | | | | | | | MMNTSNDLFIKAIELLPFYSLPLFVASNTMSISQYL |
| | | | | | | | | | VLITTIILLYFFTLKKSKKYSF |
| 98 | peg.0840 | SP_1780 | 0.066 | 5 | Protein | | Yes | Oligoendopeptidase f | MEQKHRSEFPEKELWDLTALYQDREDFLRAIEKAR |
| | | | | | processing | | | | EDINQFSRDYKGNLHTFEDFEKAFAELEQIYIQMSH |
| | | | | | | | | | IGNYGFMPQTTDYSNDEFANIAQAGMEFETAASVA |
| | | | | | | | | | LTFFDDALVVADEEVLDRLGELPHLTAAIRQAKIK |
| | | | | | | | | | KAHYLGADVEKALTNLGEVFYSPQDIYTKMRAGD |
| | | | | | | | | | FEMADFEAHGKTYKNSFVTYENFYQNHEDAEVRE |
| | | | | | | | | | KSFRSFSEGLRKHQNTAAAAYLAQVKSEKLLADM |
| | | | | | | | | | KGYDSVFDYLLAEQEVDRVMFDRQIDLIMKDFAP |
| | | | | | | | | | VAQRYLKHVAKVNGLEKMTFADWKLDLDSALNP |
| | | | | | | | | | EVTIDDAYDLVMKSVEPLGQEYCQEVARYQEERW |
| | | | | | | | | | VDFAANSGKDSGGYAADPYRVHPYVLMSWTGRL |
| | | | | | | | | | SDVYTLIHEIGHSGQFIFSDNHQSYFNAHMSTYYVE |
| | | | | | | | | | APSTLNELLLSDYLENQSNDPRQKRFALAHRLTDT |
| | | | | | | | | | YFHNFITHLLEAAFQRKVYTLIEEGETFGASKLNSI |
| | | | | | | | | | MKEVLTDFWGDAIEIDDDAALTWMRQAHYYMGL |
| | | | | | | | | | YSYTYSAGLVISTAGYLHLKNSGTGAEDWLNLLKS |
| | | | | | | | | | GGSKTPLESAMIIGADISTDKPLRDTIQFLSDTVDQII |
| | | | | | | | | | AYSAELGE |
| 99 | peg.1026 | SP_1937 | 0.066 | 5 | Cell wall | LytA | Yes | n-acetylmuramoyl-1- | MEINVSKLRTDLPQVGVQPYRQVHAHSTGNPHST |
| | | | | | processing | | | alanine amidase | VQNEADYHWRKDPELGFFSHIVGNGCIMQVGPVD |
| | | | | | | | | | NGAWDVGGGWNAETYAAVELIESHSTKEEFMTD |
| | | | | | | | | | YRLYIELLRNLADEAGLPKTLDTGSLAGIKTHEYCT |
| | | | | | | | | | NNQPNNHSDHVDPYPYLAKWGISREQFKHDIENG |
| | | | | | | | | | LTIETGWQKNDTGYWYVHSDGSYPKDKFEKINGT |
| | | | | | | | | | WYYFDSSGYMLADRWRKHTDGNWYWFDNSGEM |
| | | | | | | | | | ATGWKKIADKWYYFNEEGAMKTGWVKYKDTWY |
| | | | | | | | | | YLDAKEGAMVSNAFIQSADGTGWYYLKPDGTLA |
| | | | | | | | | | DKPEFTVEPDGLITVK |
| 100 | peg.1140 | SP_2052 | 0.066 | 5 | secretion | | | Competence protein | MVQEIAQEIIRSARKKGTQDIYFVPKLDAYELHMR |
| | | | | | | | | | VGDERCKIGSYDFEKFAAVISHFKFVAGMNVGEKR |
| | | | | | | | | | RSQLGSCDYAYDQKMASLRLSTVGDYRGHESLVI |
| | | | | | | | | | RLLHDEEQDLHFWFQDIEELGKQYRQRGLYLFAGP |
| | | | | | | | | | VGSGKTTLMHELSKSLFKGQQVMSIEDPVEIKQDD |
| | | | | | | | | | MLQLQLNEAIGLTYENLIKLSLRHRPDLLIIGEIRDS |
| | | | | | | | | | ETARAVVRASLTGATVFSTIHAKSIRGVYERLLELG |
| | | | | | | | | | VSEEELAVVLQGVCYQRLIGGGGIVDFASRDYQEH |
| | | | | | | | | | QAAKWNEQIDQLLKDGHITSLQAETEKISYS |
| 101 | peg.1399 | SP_0060 | 0.066 | 5 | CHO | | | beta-galactosidase | MTRFEIRDDFYLDGKSFKILSGAIHYFRVPPEDWYH |
| | | | | | metabolism | | | | SLYNLKALGFNTVETYVAWNLHEPREGEFHFEGD |
| | | | | | | | | | LDLEKFLQIAQDLGLYAIVRPSPFICAEWEFGGLPA |
| | | | | | | | | | WLLTKNMRIRSSDPAYIEAVGRYYDQLLPRLVPRL |
| | | | | | | | | | LDNGGNILMMQVENEYGSYGEDKAYLRAIRQLME |
| | | | | | | | | | ECGVTCPLFTSDGPWRATLKAGTLIEEDLFVTGNF |
| | | | | | | | | | GSKAPYNFSQMQEFFDEHGKKWPLMCMEFWDGW |
| | | | | | | | | | FNRWKEPIITRDPKELADAVREVLEQGSINLYMFH |
| | | | | | | | | | GGTNFGFMNGCSARGTLDLPQVTSYDYDALLDEE |
| | | | | | | | | | GNPTAKYLAVKKMMATHFSEYPQLEPLYKESMEL |
| | | | | | | | | | DAIPLVEKVSLFETLDSLSSPVESLYPQKMEELGQS |
| | | | | | | | | | YGYLLYRTETNWDAEEERLRIIDGRDRAQLYVDG |
| | | | | | | | | | QWVKTQYQTEIGEDIFYQGKKKGLSRLDILIENMG |
| | | | | | | | | | RVNYGHKFLADTQRKGIRTGVCKDLHFLLNWKHY |
| | | | | | | | | | PLPLDNPEKIDFSKGWTQGQPAFYAYDFTVEEPKD |
| | | | | | | | | | TYLDLSEFGKGVAFVNGQNLGRFWNVGPTLSLYIP |
| | | | | | | | | | HSYLKEGANRIIIFETEGQYKEEIHLTRKPTLKHIKG |
| | | | | | | | | | ENL |
| 102 | peg.1520 | SP_0180 | 0.066 | 5 | Bacteriocin | | | CAAX protease self- | MTVVFEFVSEMLKQFVGLDGQGLNQSNIQSTFQEQ |
| | | | | | ? | | | immunity | PLLIAVFACVIGPLVEELFFRQVLLHYLQERLSGLLS |
| | | | | | | | | | IILVGLVFALTHMHSLALSEWIGAVGYLGGGLAFSI |
| | | | | | | | | | IYVKEKENIYYPLLVHMLSNSLSLIILAISIVK |
| 103 | peg.1671 | SP_0323 | 0.066 | 5 | CHO | | | PTS System | MTMPNIIMTRIDERLIHGQGQLWVKYLGCNTVIVA |
| | | | | | transport | | | | NDEVSTDKMQQTLMKTVVPDSVAMRFFPLQKVID |
| | | | | | | | | | IIHKANPAQTIFIVVKDVKDALTLVEGGVPIKEINIG |
| | | | | | | | | | NIHNATGKEQVTRSIFLGEEDKAALKELSQTHQVT |
| | | | | | | | | | FNTKTTPTGNDGAVQVNIMDYI |
| 104 | peg.1866 | SP_0529 | 0.066 | 5 | bacteriocin | | | Transport protein | MNPNLFRSVEFYQRRYHNYATVLIIPLSLLFTFILIF |
| | | | | | | | | ComB | SLVATKEITVTSQGEIAPTSVIASIQSTSDNPILANHL |
| | | | | | | | | | VANQVVEKGDLLIKYSETMEESQKTALETQLQRLE |
| | | | | | | | | | KQKEGLGILKQSLEKATDLFSSEDEFGYHNTFMNF |
| | | | | | | | | | TKQSHDIELGISKTNTEVSNQANLTNSSSSAIEQEIT |
| | | | | | | | | | KVQQQIGEYQELRDAIVNKRARLPTGNPHQSILNR |
| | | | | | | | | | YLIASQEQTQGTAEEPFLSQINQSIAGLESSIASLKL |
| | | | | | | | | | QQAGIGSVATYDNSLATKIEVLRTQFLQTASQQQL |
| | | | | | | | | | TVENQLTELKVQLDQATQRLENNTLTAPSKGIVHL |
| | | | | | | | | | NSEFEGKNRIPTGTEIAQIFPIITDTREVLITYYVSSD |
| | | | | | | | | | YLPLLDKGQTVRLKLEKIGNHGTTIIGQLQTIDQTP |
| | | | | | | | | | TRTEQGNLFKLTALAKLSNEDSKLIQYGLQGRVTS |
| | | | | | | | | | VTAKKTYFDYFKDKILTHSD |
| 105 | peg.1929 | SP_0600 | 0.066 | 5 | transport | | | abc transporter atp- | MTLLQLQDVTYRYKNTAEAVLYQIDYNFEPGKFY |
| | | | | | | | | binding protein | SIIGESGAGKSTLLSLLAGLDSPVEGSILFQGEDIRK |
| | | | | | | | | | KGYSYHRMHHISLVFQNYNLIDYLSPLENIRLVNK |
| | | | | | | | | | KASKDTLLELGLDESQIKRNVLQLSGGQQQRVAIA |
| | | | | | | | | | RSLVSEAPVILADEPTGNLDPKTAGDIVELLKSLAQ |
| | | | | | | | | | KTGKCVIVVTHSKEVAQASDITLELKDKKLTETRN |
| | | | | | | | | | TSK |
| 106 | peg.2050 | SP_0724 | 0.066 | 5 | metabolism | | | 4-methy 1-5-beta- | MQEFTNPFPIGSSSLIHCMTNEISCEMLANGILALGC |
| | | | | | | | | hydroxy ethylthiazole | KPVMADDPREVLDFTKQSQALFINLGHLSAEKEKA |
| | | | | | | | | kinase | IRMAASYANQSSLPMVVDAVGVTTSSIRKSLVKDL |
| | | | | | | | | | LNYRPTVIKGNMSEIRSLVGLKHHGVGVDASAKD |
| | | | | | | | | | QETEDLLQVLKDWCQTYPGMSFLVTGPKDLIVSK |
| | | | | | | | | | NQVAVLENGCTELDWITGTGDLVGALTAVFLSQG |
| | | | | | | | | | KTGFEASCLAVSYLNIAAEKIVVQGMGLEEFRYQV |
| | | | | | | | | | LNQLSLLRRDENWLDTIKGEAYE |
| 107 | peg.0154 | n/a | 0. | 7 | plasmid | | | mob A MobL family | MADSFHFSVNIISRGKGKSAVASAAYISGEKIKNE |
| | | | 071428571 | | | | | protein | WDGVTHDYTRKEKILVKNIILPDHIPKEFNDRSTLW |
| | | | | | | | | | NKVEMAEKNSNAQLARQFIIGLPKELSLSENKNLV |
| | | | | | | | | | ERYIKENLTSQGMIVDYAIHDESQDKNGNIHCHIM |
| | | | | | | | | | TIMRPINEKGEFLAKSKKEYILDEKGEKVLNKNGK |
| | | | | | | | | | PKTRKVELTTWNDTGNVEQWRENFSDLCNKYLER |
| | | | | | | | | | AGAEKRVDHRSFKRQNSDYLPTIHLGSAASAMER |
| | | | | | | | | | KGIETDKGNYNREIRKYNQLVKTIKEEIKTLKGWIG |
| | | | | | | | | | NLLDNLSTAYEKFKDIERDKVIDNPKLFNLTNYLLT |
| | | | | | | | | | YSEIQKEKSKYLKGYAKTNKEKYDFKKLTSAYSYL |
| | | | | | | | | | RKNNIETIGQLQTKIETLKSNSYRLNKKAKTIHKEM |
| | | | | | | | | | EDVEKKILYYEIYKAKKEVYEEYQKKNIFTKEAFY |
| | | | | | | | | | NKHKKDIDQYKVVSGKLKKLLSDKEKLSPKKWNE |
| | | | | | | | | | EKILLM |
| 108 | peg.0244 | SP_1114 | 0. | 7 | transport | | | ABC transporter, | MIILQANKIERSFAGEVLFDNINLQVDERDRIALVG |
| | | | 071428571 | | | | | ATP-binding protein | KNGAGKSTLLKILVGEEEPTSGEINKKKDISLSYLA |
| | | | | | | | | | QDSRFESENTIYDEMLHVFDDLRRTDKQLRQMELE |
| | | | | | | | | | MGEKSGEDLDKLMSDYDRLSENFRQAGGFTYEAD |
| | | | | | | | | | IRAILNGFKFDESMWQMKIAELSGGQNTRLALAK |
| | | | | | | | | | MLLEKPNLLVLDEPTNHLDIETISWLENYLVNYSG |
| | | | | | | | | | ALIIVSHDRYFLDKVATITLDLTKHSLDRYVGNYSR |
| | | | | | | | | | FVELKEQKLATEAKNYEKQQKEIAALEDFVNRNL |
| | | | | | | | | | VRASTTKRAQSRRKQLEKMERLDKPEAGKKAAN |
| | | | | | | | | | MTFQSEKTSGNVVLTVENAAVGYDGEVLSQPINL |
| | | | | | | | | | DLRKMNAVAIVGPNGIGKSTFIKSIVDQIPFIKGEKR |
| | | | | | | | | | FGANVEVGYYDQTQSKLTPSNTVLDELWNDFKLT |
| | | | | | | | | | PEVEIRNRLGAFLFSGDDVKKSVGMLSGGEKARLL |
| | | | | | | | | | LAKFSMENNNFLILDEPTNHLDIDSKEVLENALIDF |
| | | | | | | | | | DGTLLFVSHDRYFINRVATHVLELSENGSTLYLGD |
| | | | | | | | | | YDYYVEKKATAEMSQTEEASTSNQAKEASPVNDY |
| | | | | | | | | | QAQKESQKEVRKLMRQIESLEAEIEELESQSQAISE |
| | | | | | | | | | QMLETNDADKLMELQAELDKISHRQEEAMLEWEE |
| | | | | | | | | | LSEQV |
| 109 | peg.0298 | SP_1185 | 0. | 7 | transport | | | Pts system | MNKLIAFIEKGKPFFEKLSRNIYLRAIRDGFIAGMP |
| | | | 071428571 | | | | | | VILFSSIFILIAFVPNSWGFKWSDEVVAFLMKPYSYS |
| | | | | | | | | | MGILALLVAGTTAKSLTDSVNRSMEKTNQINYMST |
| | | | | | | | | | LLAAIVGLLMLAADPIESGLATGFLGTKGLLSAFLA |
| | | | | | | | | | AFVTVAIYKVCVKNNVTIRMPDEVPPNISQVFKDVI |
| | | | | | | | | | PFTLSVVSLYALDLLARHFVGASVAESIGKFFAPLF |
| | | | | | | | | | SAADGYLGITIIFGAFAFFWFVGIHGPSIVEPAIAAIT |
| | | | | | | | | | YANAEVNLNLLQQGMHADKILTSGTQMFIVTMGG |
| | | | | | | | | | TGATLVVPFMFMWLTKSKRNRAIGRASVVPTFFG |
| | | | | | | | | | VNEPILFGAPLVLNPIFFIPFIFVPIANVWIFKFFIE |
| | | | | | | | | | TLGMNSFTANLPWTTPAPLGLVLGTNFQVLSFILAAL |
| | | | | | | | | | LIVVDVVIYYPFLKVYDEQILEEERSGKSNDELKEK |
| | | | | | | | | | VAANFNTAKADAILEKAGVEAAQNTITKETNVLVL |
| | | | | | | | | | CAGGGTSGLLANALNKAAAEYNVPVKAAAGGYG |
| | | | | | | | | | AHREMLPEFDLVILAPQVASNFEDMKAETDKLGIK |
| | | | | | | | | | LAKTEGAQYIKLTRDGKGALAFVQAQFD |
| 110 | peg.0427 | n/a | 0. | 7 | unknown | | | NA | LQNLKKYLLLDSGLVVGYTLENAQLKLNKLKKDT |
| | | | 071428571 | | | | | | ENNPLFGEEYFAENPKLWEVRFDNSYPNVIYDKEL |
| | | | | | | | | | KLYRCWYQTFVSDEASEETPLAERGEKEYIVKSSR |
| | | | | | | | | | MTALCYAESKDGVKWEKPNLNLVKFKGSKDNNIV |
| | | | | | | | | | LMHAHGAGIMLDEQELDPKKRYKLVSKLEFSPNL |
| | | | | | | | | | HYMVVVFSEDGIHFDEPIPWKKWNPAADSHNFPFR |
| | | | | | | | | | DPKTGKYAVITRTWANNVRLSAITFSDDFINWSEP |
| | | | | | | | | | KEILRGDGFEDQIYSMPVISYADIYLGFASMYHEGD |
| | | | | | | | | | TLNENYDKVDLELKFSANLEQWDSVCKGDYLIER |
| | | | | | | | | | GGGVYPQNADFDASCIFTAAPIIEDDKIWFYYMGG |
| | | | | | | | | | NGNHTGFRESSLARGYIKKDQFAYYTNKREGIPAK |
| | | | | | | | | | ISTVSFQTYDDEIYILADIPENGYVKVAVGTKYGNA |
| | | | | | | | | | YSDFGQEDISLVQVSDGKYKLEFNKKSILDLGNSP |
| | | | | | | | | | VAFKFEIENAKLYGIEGSIQQHYLKY |
| 111 | peg.0439 | SP_1344 | 0. | 7 | bacteriocin | | | serine threonine | MNNDEWVYQYPIGKFVERQGWKIHISSEYNSSHEL |
| | | | 071428571 | | | | | protein kinase | LQDVAKICHEMRIPFKHLSTEDKFIMRNGKLVSRG |
| | | | | | | | | | FSGKFITCYPNQNELESVLQRLESALKQYNGPYILS |
| | | | | | | | | | DKRWDEAPIYLRYGVFRPSRDDEKKVVIDELIVGD |
| | | | | | | | | | EVVKDERLPVFKIPKGIVPPDFLNKWLDKKDKKQG |
| | | | | | | | | | DFPFIIDNAIRFSNSGGIYNARLKEDGKKIILKEARP |
| | | | | | | | | | YTGLGFDGTYSSERLASECKALKILNEWSEMPKIY |
| | | | | | | | | | WYGKIWEHTFLGIEHMKGVPLNRWVTNNFPLYEV |
| | | | | | | | | | VDKTKDYLLRVSKIVEKLIDLTNKFHSENVYHQDL |
| | | | | | | | | | HLGNILVKDEDEISIIDWEQAVFSNDEKVVHKVAA |
| | | | | | | | | | PGFRAWRETLPSEIDWYGIRQIAHYLYMPLVTTSD |
| | | | | | | | | | LTYNYVSQTRIEGKKLFESLGYTREHIDYVESLLSY |
| | | | | | | | | | LDSKCPQIENISRKKVLKPMHEIRTIESEQDIQDFIIK |
| | | | | | | | | | AFLLVN |
| 112 | peg.0575 | SP_1493 | 0. | 7 | adhesin | | | surface protein | MNIILIAKLLRENTNTKANALNNGWARSGSEEFKK |
| | | | 071428571 | | | | | | FSHFVGVDKGIVRTNVLTGKKLSDKIRKEVGSGDS |
| | | | | | | | | | KLGKGGYFSTGDVLLGKDVVSYTVQVFSENNERV |
| | | | | | | | | | GVNTQSHRVQYNLPILADFSVIQDTVEPSRTVVEKI |
| | | | | | | | | | IPKLNIPEEEKGKITEEIKKKKKTSELAELISENVKV |
| | | | | | | | | | RYVDEQGRLLSLKNDTGIGEKESDGTYITNKKQLI |
| | | | | | | | | | GTSYNVTDKKLSSMTTTDGKYYTFKEVDTNSASL |
| | | | | | | | | | TGNIVSEGRTVTLVYRESEAPTTVTVTANYYKEGS |
| | | | | | | | | | QEKLAESVIKADLAIGSEYTTESKTIEGKTTTEDKE |
| | | | | | | | | | NRVITRKTTYTLVATPANAYQKTVQQLTITTVRML |
| | | | | | | | | | RKQWFPKQQPLLRRRL |
| 113 | peg.0613 | SP_1527 | 0. | 7 | Peptide | AliB | | Oligopeptide-binding | MKKSKSKYLTLAGLVLGTGVLLSACGNSSTASKT |
| | | | 071428571 | | transport | | | protein | YNYVYSSDPSSLNYLAENRAATSDIVANLVDGLLE |
| | | | | | | | | | NDQYGNIIPSLAEDWTVSQDGLTYTYKLRKDAKW |
| | | | | | | | | | FTSEGEEYAPVTAQDFVTGLQYAADKKSEALYLV |
| | | | | | | | | | QDSVAGLDDYITGKTSDFSTVGVKALDDQTVQYT |
| | | | | | | | | | LVKPELYWNSKTLATILFPVNADFLKSKGDDFGKA |
| | | | | | | | | | DPSSILYNGPFLMKALVSKSAIEYKKNPNYWDAKN |
| | | | | | | | | | VFVDDVKLTYYDGSDQESLERNFTAGAYTTARLFP |
| | | | | | | | | | NSSSYEGIKEKYKNNIIYSMQNSTSYFFNFNLDRKS |
| | | | | | | | | | YNYTSKTSDIEKKSTQEAVLNKNFRQAINFAFDRTS |
| | | | | | | | | | YGAQSEGKEGATKILRNLVVPPNFVSIKGKDFGEV |
| | | | | | | | | | VASKMVNYGKEWQGINFADGQDPYYNPEKAKAK |
| | | | | | | | | | FAEAKKELEAKGVQFPIHLDKTVEVTDKVGIQGVS |
| | | | | | | | | | SIKQSIESVLGSDNVVIDIQQLTSDEFDSSGYFAQTA |
| | | | | | | | | | AQKDYDLYHGGWGPDYQDPSTYLDIFNTNSGGVL |
| | | | | | | | | | QNLGLEPGEANDKAKAVGLDVYTQMLEEANKEQ |
| | | | | | | | | | DPAKRYEKYADIQAWLIDSSLVLPSVSRGGTPSLR |
| | | | | | | | | | RTVPFAAAYGLTGTKGVESYKYLKVQDKIVTTDE |
| | | | | | | | | | YAKAREKWLKEKEESNKKAQEELAKHVK |
| 114 | peg.0695 | SP_1612 | 0. | 7 | regulation | | | serine threonine | MDLLEKECLKCDKNFQQGDIWNYYYLSDKMPAQ |
| | | | 071428571 | | | | | protein kinase | GWKIHISSQIKDAVNIFKIVYKLSQLNNCSFKVVKN |
| | | | | | | | | | LEELKKINSPREMSPTANKFITLYPKSESKAKSMIC |
| | | | | | | | | | NLTNRLSEFKAPKILSDYQCGMHSPVHYRYGAFLK |
| | | | | | | | | | KQAYDEKNKKVIYLLLDEKRKNYVEDKRQNFPSL |
| | | | | | | | | | PSWKMDLFSEEEKRIYFQTTCEVSSKDSAINKYKM |
| | | | | | | | | | EKIIKRSNKGNVYRAIRKSDGQKVIIKQSRPFVNYD |
| | | | | | | | | | AEGEWTALDDIKNEAHMLKKLADKSYTTNLTDEF |
| | | | | | | | | | YIVDDYFLVQEQVDGLNFEEFIRETEHSLNIREKTL |
| | | | | | | | | | DNIVNIVSYIHKLGI |
| 115 | peg.0853 | SP_1790 | 0. | 7 | recombinat | | Yes | recombination factor | MPDNLALRMRPKTIDQVIGQEHLVGPGKIIRRMVE |
| | | | 071428571 | | ion | | | protein RarA | ANRLSSMILYGPPGIGKTSIASAIAGTTKYAFRTFN |
| | | | | | | | | | ATVDSKKRLQEISEEAKFSGGLVLLLDEIHRLDKTK |
| | | | | | | | | | QDFLLPLLESGLVIMIGATTENPFFSVTPAIRSRVQIF |
| | | | | | | | | | ELEPLSNQDVKEALQIALSNPERGFDFPIELDEDAL |
| | | | | | | | | | DFIATSTNGDLRSAFNSLDLAVLSTPENDEGIRHITL |
| | | | | | | | | | DIMENSLQRSYITMDKDGDGHYDVLSALQKSIRGS |
| | | | | | | | | | DVDASLHYTARLIEAGDLPSLARRLTVIAYEDIGLA |
| | | | | | | | | | NPEAQIHTVTALDAAQKIGFPEARILIANVVIDLALS |
| | | | | | | | | | PKSNSAYVAMDKALADLKTSGHLPIPRHLRDGHY |
| | | | | | | | | | SGSKELGNAQDYLYPHNYPGNWVKQDYLPEKIRN |
| | | | | | | | | | HHYFQAEDTGKYERALAQRKEAIDRLRKI |
| 116 | peg.0859 | SP_1800 | 0. | 7 | regulation | | | M protein trans- | MRDLLSKKSHRQLELLELLFEHKRWFHRSELAELL |
| | | | 071428571 | | | | | acting positive | NCTERAVKDDLSHVKSAFPDLIFHSSTNGIRIINTDD |
| | | | | | | | | regulator (MGA) | SDIEMVYHHFFKHSTHFSILEFIFFNEGCQAESICKE |
| | | | | | | | | PRD domain | FYISSSSLYRIISQINKVIKRQFQFEVSLTPVQIIGNE |
| | | | | | | | | | RDIRYFFAQYFSEKYYFLEWPFENFSSEPLSQLLELV |
| | | | | | | | | | YKETSFPMNLSTHRMLKLLLVTNLYRIKFGHFMEV |
| | | | | | | | | | DKDSFNDQSLDFLMQAEGIEGVAQSFESEYNISLDE |
| | | | | | | | | | EVVCQLFVSYFQKMFFIDESLFMKCVKKDSYVEKS |
| | | | | | | | | | YHLLSDFIDQISVKYQIEMENKDNLIWHLHNTAHL |
| | | | | | | | | | YRQELFTEFILFDQKGNTIRNFQNIFPKFVSDIKKEL |
| | | | | | | | | | SHYLETLEVCSSSMMVNHLSYTFITHTKHLVINLLQ |
| | | | | | | | | | NQPKLKVLVMSNFDQYHAKFVAETLSYYCSNNFE |
| | | | | | | | | | LEVWTELELSKESLEDSPYDIIISNFIIPPIENKRLI |
| | | | | | | | | | YSNNINTVSLIYLLNAMMFIRLDE |
| 117 | peg.0937 | SP_1872 | 0. | 7 | transport | | | Periplasmic binding | MKTSLKLYFTALVASFLLLLGACSTNSSTSQTETSS |
| | | | 071428571 | | | | | protein | SAPTEITIKSSLDEVKLSKVPEKIVTFDLGAADTIRA |
| | | | | | | | | | LGFEKNIVGMPTKTVPTYLKDLAGTVKNVGSMKE |
| | | | | | | | | | PDLEAIAALEPDLIIASPRTQKFVDKFKEIAPTVLFQ |
| | | | | | | | | | ASKDDYWTSTKANIESLASAFGETGTQKAKEELAK |
| | | | | | | | | | LDKSIQEVATKNESSDKKALAILLNEGKMAAFGAK |
| | | | | | | | | | SRFSFLYQTLKFKPTDTTFEDSRHGQEVSFESVKEI |
| | | | | | | | | | NPDILFVINRTLAIGGDNSSNDGVLENALIAETPAA |
| | | | | | | | | | KNGKIIQLTPDLWYLSGGGLESTKLMIEDIQKALK |
| 118 | peg.1088 | SP_2000 | 0. | 7 | regulation | | | response regulator | MKVLVAEDQSMLRDAMCQLLAFQADVESVLQAK |
| | | | 071428571 | | | | | | NGQEAIQLLEKESVDIAILDVEMPVKTGLEVLEWIR |
| | | | | | | | | | AEKLETKVVVVTTFKRPGYFERAVKAGVDAYVLK |
| | | | | | | | | | ERNIADLMQTLHTVLEGGKEYSPELMEVVMMHPN |
| | | | | | | | | | PLTEQEIAVLKGIAQGLSNQEIADQLYLSNGTVRNY |
| | | | | | | | | | VTNILSKLDAGNRTEAANIAKESGWL |
| 119 | peg.1089 | SP_2001 | 0. | 7 | regulation | | Yes | Histidine kinase | MLERLKSIHYMFWISLIFMIFPILPVVTGWLSAWHL |
| | | | 071428571 | | | | | | LIDILFVVAYLGVLITKSQRLSWLYWGLMLSYVVG |
| | | | | | | | | | NTAFVAVNYIWFFFFLSNLLSYHFGVRSFNSLHVR |
| | | | | | | | | | TFLLAQVLVVGQLLIFQEVEVEFLVYLLGILTFIDL |
| | | | | | | | | | MTFGLVRIRIMEDLKEAQAKQNAQINLLLAENERS |
| | | | | | | | | | RIGQDLHDSLGHTFAMLSVKTDLALQLFQIQAYPQ |
| | | | | | | | | | VEKELREIQQISKESMREVRTIVENLKSRTLISELET |
| | | | | | | | | | VKKMLEIAGIEVETDNQLDTASLTQKLESTASMILL |
| | | | | | | | | | ELVTNIIKHAKASKVYLKLERTEKELILTVRDDGCG |
| | | | | | | | | | FASIKGDDLHTVRDRILPFSGEVKVISWKQPTEVQV |
| | | | | | | | | | RLPYKERK |
| 120 | peg.1119 | SP_2032 | 0. | 7 | regulation | | | PRD domain protein | MVLDKASCDLLQYLMDQETSKTIMAISKDLKESRR |
| | | | 071428571 | | | | | | KIYYHIDKINAALGDEALHIISIPRIGIHLTEEQRDAC |
| | | | | | | | | | CKLLSEVDSYDYIMSAHERMMIMLLWIGISKERITI |
| | | | | | | | | | EKLIELTEVSRNTVLNDLNSIRYQLTLEQYQVTLQV |
| | | | | | | | | | SKSQGYHLHAHPLNKIQYLQSLLYHIFMEENATFV |
| | | | | | | | | | SILEDKMKERLDDECLLSVEMNQFFKEQVPLVEQD |
| | | | | | | | | | LGKKINHHEITFMLQVLPYLLLSCHNVEQYQERHQ |
| | | | | | | | | | DIEKEFSLIRKRIEYQVSKKLGERLFQKFEISLSGLE |
| | | | | | | | | | VSLVAVLLLSYRKDLDIHAESDDFRQLKLALEEFI |
| | | | | | | | | | WYFESQIRMEIENKDDLLRNLMIHCKALLFRKTYG |
| | | | | | | | | | IFSKNPLTKQIRSKYGELFLATRKSAEILEGAWFIRL |
| | | | | | | | | | TDDDIAYLTIHIGGFLKYTPSSQKNMKKVYLVCDE |
| | | | | | | | | | GVAVSRLLLKQCKLYFPNEQIDTVFTTEQFKSVEDI |
| | | | | | | | | | AQVDVVITTNDDLDSRFPILRVNPILEAEDILKMLD |
| | | | | | | | | | YLKHNIFRNKSKSFSENLSSLISSYIVDSKLASKFQE |
| | | | | | | | | | EVQTLINQEIVVQAFLEDI |
| 121 | peg.1192 | SP_2106 | 0. | 7 | CHO | | Yes | Phosphorylase is an | MLSLQEFVQNRYNKTIAECSNEELYLALLNYSKLA |
| | | | 071428571 | | metabolism | | | important allosteric | SSQKPVNTGKKKVYYISAEFLIGKLLSNNLINLGLY |
| | | | | | | | | enzyme in | DDVKKELAAAGKDLIEVEEVELEPSLGNGGLGRLA |
| | | | | | | | | carbohydrate | ACFIDSIATLGLNGDGVGLNYHFGLFQQVLKNNQQ |
| | | | | | | | | metabolism. | ETIPNAWLTEQNWLVRSSRSYQVPFADFTLTSTLY |
| | | | | | | | | Enzymes from | DIDVTGYETATKNRLRLFDLDSVDSSIIKDGINFDK |
| | | | | | | | | different sources | TDIARNLTLFLYPDDSDRQGELLRIFQQYFMVSNG |
| | | | | | | | | differ in their | AQLIIDEAIEKGSNLHDLADYAVVQINDTHPSMVIP |
| | | | | | | | | regulatory | ELIRLLTARGIELDEAISIVRSMTAYTNHTILAEALE |
| | | | | | | | | mechanisms and in | KWPLEFLQEVVPHLVPIIEELDRRVKAEYKDPAVQI |
| | | | | | | | | their natural | IDESGRVHMAHMDIHYGYSVNGVAALHTEILKNS |
| | | | | | | | | substrates. However, | ELKAFYDLYPEKFNNKTNGITFRRWLMHANPRLS |
| | | | | | | | | all known | HYLDEILGDGWHHEADELEKLLSYEDKAAVKEKL |
| | | | | | | | | phosphorylases share | ESIKAHNKRKLARHLKEHQGVEINPNSIFDIQIKRL |
| | | | | | | | | catalytic and | HEYKRQQMNALYVIHKYLDIKAGNIPARPITIFFGG |
| | | | | | | | | structural properties | KAAPAYTIAQDIIHLILCMSEVIANDPAVAPHLQVV |
| | | | | | | | | (By similarity) | MVENYNVTAASFLIPACDISEQISLASKEASGTGNM |
| | | | | | | | | | KFMLNGALTLGTMDGANVEIAELVGEENIYIFGED |
| | | | | | | | | | SETVIDLYAKAAYKSSEFYAREAIKPLVDFIVSDAV |
| | | | | | | | | | LAAGNKERLERLYNELINKDWFMTLLDLEDYIKV |
| | | | | | | | | | KEQMLADYEDRDAWLDKVIVNISKAGFFSSDRTIA |
| | | | | | | | | | QYNEDIWHLN |
| 122 | peg.1485 | SP_0145 | 0. | 7 | transport | | | Major Facilitator | MKVFLQNRDFRQLTINQWISTLGDTIFYLAFLNYV |
| | | | 071428571 | | | | | | ADASFAPLTILLITISETLPQILQIFLGVLADFQHHRV |
| | | | | | | | | | LKYTVISFAKFLLYSIVSLSLSGQSFSLLLVAFICLLN |
| | | | | | | | | | LLSDTLSYFSGAMLTPIFIRIIGQDHLAEAIGFKQST |
| | | | | | | | | | VSLVKTISNILGGVLLGILSIQFISLLNALTFLIAFLG |
| | | | | | | | | | ILFIKTDLLKVEKTISYQEGLSVKSFCQHLLQSSKLI |
| | | | | | | | | | WNMNKVLLVLFIISTSQAVINVTVPVSTLFLRNQPF |
| | | | | | | | | | LNLQTGQSLALLSTFELSALIVGSLVSGYLQHTISIK |
| | | | | | | | | | TALYASLVIQLLLLVGFATVRFDWILIFSTLDAFFA |
| | | | | | | | | | GVLSPRLQELVFKQIPEESMGAVQSSIGAITVVLPSL |
| | | | | | | | | | FTIALVTIATSFGTLAVSFVLLLFLLVAFVMLLNIRE |
| | | | | | | | | | SI |
| 123 | peg.1514 | SP_0176 | 0. | 7 | CHO | | | Catalyzes the | MEYRKIQEALEALQKGRLVLVIDDKDRENEGDLIC |
| | | | 071428571 | | metabolism | | | conversion of D- | SAQAATTENVNFMATYAKGLICMPMSESLANQLM |
| | | | | | | | | ribulose 5-phosphate | LSPMVENNTDNHKTAFTVSIDYKETTTGISAEERGL |
| | | | | | | | | to formate and 3,4- | TARMCVAEDITPSDFRRPGHMFPLIAKKGGVLERS |
| | | | | | | | | dihydroxy-2- | GHTEATVDLLKLAGLKECGLCCEIMNHDGKMMR |
| | | | | | | | | butanone 4-phosphate | TDDLIQFSKKHNIPLITIKELQEYRKVYDQLVERVS |
| | | | | | | | | (By similarity) | TVNMPTRYGNFKAISYIDKLNGEHHLALIMGNIED |
| | | | | | | | | | EANVLCRVHSECLTGDVLGSLRCDCGQQFDKAMK |
| | | | | | | | | | MIVENGSGVLLYLRQEGRGIGLINKLKAYHLQDQG |
| | | | | | | | | | MDTLDANLALGFEGDLREYHIGAQMLKDLGLQSL |
| | | | | | | | | | HLLTNNPDKVEQLEKYGITISSRISIEIEANPYDSFYL |
| | | | | | | | | | ETKKNRMGHILNMEEK |
| 124 | peg.1632 | n/a | 0. | 7 | CHO | | | glycoside hydrolase | MSKFPKEFLWGGATAANQYEGAYNVGDKGLSVQ |
| | | | 071428571 | | metabolism | | | family 1 | DVTPRGGVPVSDNDPNPFITELPTEDNLKLEGIDFY |
| | | | | | | | | | HRYKEDVALFAEMGFKVFRTSIAWSRIFPNGDELE |
| | | | | | | | | | PNEEGLQFYDNLFDELAKYGIEPLVTLSHYETPLHL |
| | | | | | | | | | ARKYNGWVNRDLIGFYERYVRTVFNRYKNKVKY |
| | | | | | | | | | WLTFNEINSVLHVPFISGGIATPVEKLSKQDLYQAV |
| | | | | | | | | | HHELVASALATKVGHEINPEFKIGCMVLAMPTYP |
| | | | | | | | | | MTPKPEDVLAAREFENQNYLFSDIHARGKYPKYIQ |
| | | | | | | | | | RFFKENDINIKFESGDKELLAENTVDFISFSYYMSS |
| | | | | | | | | | VQAHDPENYQSGIGNLLGGIANPYLESSEWGWQV |
| | | | | | | | | | DPIGLRIVLNNLYDRYQLPLFIVENGLGAKDVLIEG |
| | | | | | | | | | ADGPTVDDDYRIDYLKKHLQQVGEAIEDGVELLG |
| | | | | | | | | | YTTWGCIDLVSASTAQMSKRYGFIYVDRNDDGSG |
| | | | | | | | | | TLNRYKKKSFYWYKEVIESNGETLYD |
| 125 | peg.2032 | SP_0706 | 0. | 7 | unknown | | | NA | LEMGKLSSHMWRLNQIIYTKYFWGYVLFWILICLG |
| | | | 071428571 | | | | | | LWYWLEGNDRLVIEILKGPNLSQNSFLVLSIWLLH |
| | | | | | | | | | WFIIHTFFLAVVYRRRASDFFMEVIRFSSIKLWIRYQ |
| | | | | | | | | | IWTCFLYGLILIMVKVLVIQFMLQLPNWDIGVLFIV |
| | | | | | | | | | DSLNACVLSLLCFMLYALGANVQMNFACVSFFLL |
| | | | | | | | | | MIVFGGLFVGNRTNYLFYILNRGNGDIGRDLFLQL |
| | | | | | | | | | LFLVFLFKSIFYFTRQKRRFIE |
| 126 | peg.0083 | SP_0965 | 0.083 | 6 | Cell wall | | | endo-beta-N- | MKKVRFIFLALLFFLASPEGAMASDGTWQGKQYL |
| | | | | | processing | | | acetyl- | KEDGSQAANEWVFDTHYQSWFYIKADANYAENE |
| | | | | | | | | eglucosaminidas | WLKQGDDYFYLKSGGYMAKSEWVEDKGSFYYLD |
| | | | | | | | | | QDGKMKRNAWVGTSYVGATGAKVIEDWVYDSQ |
| | | | | | | | | | YDAWFYIKADGQHAEKEWLQIKGKDYYFKSGGY |
| | | | | | | | | | LLTSQWINQAYVNASGAKVQQGWLFDKQYQSWF |
| | | | | | | | | | YIKENGNYADKEWIFENGHYYYLKSGGYMAANE |
| | | | | | | | | | WIWDKESWFYLKFDGKIAEKEWVYDSHSQAWYY |
| | | | | | | | | | FKSGGYMTANEWIWDKESWFYLKSDGKIAEKEW |
| | | | | | | | | | VYDSHSQAWYYFKSGGYMTANEWIWDKESWFYL |
| | | | | | | | | | KSDGKIAEKEWVYDSHSQAWYYFKSGGYMTANE |
| | | | | | | | | | WIWDKESWFYLKSDGKMAEKEWVYDSHSQAWY |
| | | | | | | | | | YFKSGGYMAKNETVDGYQLGSDGKWLGGKTTNE |
| | | | | | | | | | NAAYYQVVPVTANVYDSDGEKLSYISQGSVVWLD |
| | | | | | | | | | KDRKSDDKRLAITISGLSGYMKTEDLQALDASKDF |
| | | | | | | | | | IPYYESDGHRFYHYVAQNASIPVASHLSDMEVGKK |
| | | | | | | | | | YYSADGLHFDGFKLENPFLFKDLTEATNYSAEELD |
| | | | | | | | | | KVFSLLNINNSLLENKGATFKEAEEHYHINALYLLA |
| | | | | | | | | | HSALESNWGRSKIAKDKNNFFGITAYDTTPYLSAK |
| | | | | | | | | | TFDDVDKGILGATKWIKENYIDRGRTFLGNKASG |
| | | | | | | | | | MNVEYASDPYWGEKIASVMMKINEKLGGKD |
| 127 | peg.0162 | SP_1043 | 0.083 | 6 | unknown | | Yes | NA | MVVYIRQSKLPSEVSINKYHAQVGAYLQGEEAVL |
| | | | | | | | | | YQSFSEIKELTSEDIVVDYIMETRALLKMMGLNVP |
| | | | | | | | | | VHDYPIELKEFYGRKIYAGILGEIVNIPDNWGKFIKP |
| | | | | | | | | | KAGSKVFTGRVVNGTHDLIGIGLPFDYPIWISEVVE |
| | | | | | | | | | FIAEWRCFVLDGRVLDVRPYTGDYHAQFDASVIDE |
| | | | | | | | | | AISCWKDAPIAYGLDIGVTRDGRTLVVEVNDGYAL |
| | | | | | | | | | GNYGLSPLKSINFHRARWKEMVKPYFEKNEIFKIQ |
| | | | | | | | | | QDVVF |
| 128 | peg.0171 | SP_1052 | 0.083 | 6 | unknown | | | atpase involved in | MLAEAIIKNGIEIVVVTDHNTTKGIKKLQMAVSIIM |
| | | and | | | | | | dna repair | KNYPIYDIHPHILHGVEISAADKLHIVCIYDYEQES |
| | | SP_1053 | | | | | | | WVNQWLSENIISEKDGSYQHSLTIMKDFNNQKIVN |
| | | | | | | | | | YIAHFNSYDILKKGSHLSGAYKRKIFSKENTRFLEF |
| | | | | | | | | | NINSKESSQQLDILYKEVGVLSLGQKVVAMLDFLL |
| | | | | | | | | | AYSDYSKDFRPLIIDQPEDNLDNRYIYRHLVQQFRD |
| | | | | | | | | | VKAQRQIILATHNATIVTNSMTDQVVIMESDGVNG |
| | | | | | | | | | WIESQGYVSEKYIKNHIINQLEGGKDSFKHKMSIYE |
| | | | | | | | | | TALSE |
| 129 | peg.0283 | SP_1170 | 0.083 | 6 | unknown | | Yes | NA | MSEVDFNEAVNYEFTSDTCQLANSIYQSLFKFFDK |
| | | | | | | | | | KNFSGDLIFTWKSPSLVKEGDYIGRRDSQVDNLRVI |
| | | | | | | | | | GNIFPNYLTNRKYSLNMNRNGCMGDFPHDFFDIYL |
| | | | | | | | | | DHVAKYAYEQKVNNIKEYYPLKRAILHQENALYF |
| | | | | | | | | | RFFSNFDDFLEKNYLKTIWQVSKETPFSEMDFNMF |
| | | | | | | | | | KNISEKIIFERGSKMLNDLKSNYKK |
| 130 | peg.0548 | n/a | 0.083 | 6 | transport | | | abc transporter, ATP- | MVNNVAVKVSNLSKEFLLGQDKTVSILKDISLSVN |
| | | | | | | | | binding protein | YGEFVSILGVSGSGKSTLLSCLSSLSEPTSGEVVING |
| | | | | | | | | | VNPYTLKEGKLAKFRRQDIAIIFQNYNLVPALPVLE |
| | | | | | | | | | NVTLPLRLSGKSVDSNKVKKMLDSLNFKAELSSLV |
| | | | | | | | | | ATLSGGEQQKVAITRAIIADSKIIFADEPTGALDSVS |
| | | | | | | | | | RKLIFETLRNLASQGKCVLMVTHDIELASKTDRALI |
| | | | | | | | | | LKDGKISRQIIKPSADELYQALESSKD |
| 131 | peg.0607 | SP_1523 | 0.083 | 6 | regulation | | | SNF2 family | MAKLIPGKIRIEGVALYETGKVDIIKEKNNRLYARV |
| | | | | | | | | | AEEELRYSLEDDLVFCACDFFQKRGYCVHLAALE |
| | | | | | | | | | HFLKNDERGQEILWSLEEGHEEKEAVETKVTLGGK |
| | | | | | | | | | FLDRILSPKSECAYELSAVGQVEAGTNHILWTLRIG |
| | | | | | | | | | QINSQKYYVIRDIPLFLRIVEQRKSYMIGKIYEESLS |
| | | | | | | | | | WEAFDDASQELLTFLHGLTEEGLVSDLFFQNQGRH |
| | | | | | | | | | LFFPLTFFEQGVNLLMALPHFQFDHQVDSYQTLLF |
| | | | | | | | | | QDMHADANLFAFTVTEYSDYFEMEISESPRVNVFY |
| | | | | | | | | | QGAVLFHKGQVYFLTDQQMRLLKEIKALPVGQQG |
| | | | | | | | | | KKYLQFDSSDRDKLASCLTLFIQMGTVSAPERLQIK |
| | | | | | | | | | TFAPSFYFDREEDNRIRLEIQFDYGNRQVSSRQELE |
| | | | | | | | | | ELPFSSDADLEERIFQVCLAAGFEADFQSWRQALK |
| | | | | | | | | | AESVYHFFHDIIPVFEKLGHVDLSDKLEELYSLASP |
| | | | | | | | | | QVQIASKGGLLEIQFDFQDIAQEEIDQAMQALVAN |
| | | | | | | | | | QDFYIDSSNQVYFFDEETKKIRQNLQELGQFELKD |
| | | | | | | | | | GTLQARKSLAYSLAHLFEGRDRVSFSQEFQNLAQD |
| | | | | | | | | | LTHPEDFPRQATQVQADLRDYQEKGIGWLQMLHH |
| | | | | | | | | | YGFGGILADDMGLGKTLQTIAFLTSQVTKESRVLIL |
| | | | | | | | | | APSGLIYNWADEFQKFAPQLDVAVVHGLKASREEI |
| | | | | | | | | | LAESHQIYVTSYATFRQDSELYQGMAFDFLFLDEA |
| | | | | | | | | | QVMKNAQTKIAQTLRQFVVPSVFALSGTPIENHLG |
| | | | | | | | | | ELWSIFQIVMPGLLPSKKEFMKLPAERVAQFIKPFV |
| | | | | | | | | | MRRKKEEVLTELPDLIEVVYKNELEDQQKAIYLAQ |
| | | | | | | | | | LQQMRDHLAQVSEQEFQRSRVEILSGLMRLRQICD |
| | | | | | | | | | TPALFMEDYQGASGKLDSLRDLLVQVADGGHRVL |
| | | | | | | | | | IFSQFKGMLEKIEQELPDLGLTSFKITGSTPAKERQD |
| | | | | | | | | | MTKAFNQGERDAFLISLKAGGVGLNLTGADTVILV |
| | | | | | | | | | DLWWNPAVEAQAIGRAHRMGQEETVEVYRLVTK |
| | | | | | | | | | GTIEEKIQELQEQKKHLVSQVLDGTESRGSLTLAEI |
| | | | | | | | | | REILGISEAST |
| 132 | peg.0611 | SP_1526 | 0.083 | 6 | transport | | | ABC transporter | LTEKIQEHELIKTNQAEKSVQDVLDNCIERVQNNSL |
| | | | | | | | | transmembrane | KSDRVTSFETPFALLFIFATIAVMLTYGGYRVSAGY |
| | | | | | | | | region | ISVGTLVSFLIYLFQLLNPISNIANFVTVYSRSKGSS |
| | | | | | | | | | VALDNLLAVPKEKFEGGKSVSGQGLNFNHVYFGY |
| | | | | | | | | | DENRPVLKDITCSIFKGQKLLLLDHLDQENQRLCV |
| | | | | | | | | | C |
| 133 | peg.0696 | n/a | 0.083 | 6 | bacteriocin | | | serine threonine | MTPIKDKVRRVKTPMMVNPDTDLTISSVQQDYFSL |
| | | | | | | | | protein kinase | ALIGFSLLTGDFLSFSKGDQKTGLSAFIKICHLIKIAR |
| | | | | | | | | | LDNKITKQQEYWLYDLLMMSQGEKIQKIKQLKQV |
| | | | | | | | | | TSDILLNTPDFSSYFEKYNFKEEAENIKSYLLAKSM |
| | | | | | | | | | DKSGRLFPSNEFGEFVSPVSFQHGFGGVLFFMNKY |
| | | | | | | | | | YVEEDENTVKEWLTKLENYEAANFLHGYSLLFGK |
| | | | | | | | | | AGFLFGILDRYEKTKERYLIDISKRLVDHLMRVYD |
| | | | | | | | | | NISNLDFALGKSGILLSLMKYCTIFDDKKLANFIKN |
| | | | | | | | | | NINDAYSLLESEDNGDIYSNNFAHGRSGAAYVLKA |
| | | | | | | | | | YTDIFGDSRYQNHLQKFSDGISELLEEKLSSFSKLD |
| | | | | | | | | | NLGLSWCDGVSGLILYLCLIDKERYSEIIYKSQLEM |
| | | | | | | | | | VQQYEAMGTSFCHGLSSLLQTTIYNKNQKVEQFIK |
| | | | | | | | | | KNLIDSFLS |
| 134 | peg.0762 | SP_1688 | 0.083 | 6 | CHO | | | ABC transporter, | MKKKSGIYLDILSHVLLVGATIVAVFPLVWIIISSVK |
| | | | | | transport | | | permease | GKGELTQYPTRFWPEQFTLDYFTHVINDLHFIDNIR |
| | | | | | | | | | NSLIIALATTLIAIIISAMAAYGIVRFFPKLGAIMSRL |
| | | | | | | | | | LVITYIFPPILLAIPYSIAIAKVGLTNSLFGLMMVYLS |
| | | | | | | | | | FSVPYAVWLLVGFFQTVPIGIEEAARIDGANKFVTF |
| | | | | | | | | | YKVVLPIVAPGIVATAIYTFINAWNEFLYALILINNT |
| | | | | | | | | | GKMTVAVALRSLNGSEILDWGDMMAASVIVVLPS |
| | | | | | | | | | IIFFSIIQNKIASGLSEGSVK |
| 135 | peg.7089 | SP_1715 | 0.083 | 6 | transport | | | NA | MFWNLVHYEFKNVNKWYLALYAAVLVLSALIGIQ |
| | | | | | | | | | TQGFKNLPYQESQATMLLFLATVFGGLMLTLAISTI |
| | | | | | | | | | FLIIKRFKGSVYDRQGYLTLTLPVSEHHIITAKLIGA |
| | | | | | | | | | FIWSLISTAVLALSAVIILALTAPEWIPLSYVITFVET |
| | | | | | | | | | HLPQIFLTGISFLLNTISGILCIYLAISIGQLFNEYRT |
| | | | | | | | | | ALAVAAYIGIQIVIGFIELFFNLSSNFYVNSLVGLNDH |
| | | | | | | | | | FYMGAGIAIVKELIFIAIFYLGTYYILRNKVNLL |
| 136 | peg.0790 | SP_1717 | 0.083 | 6 | transport | | | ABC transporter, | MRNMWVVIKETYLRHVKSWSFFFMVISPFLFLGIS |
| | | | | | | | | permease | VGIGHIQGSSMAKNNKVAVVTTVPSVAEGLKNVN |
| | | | | | | | | | GVNFDYKDEASAKEAIKEEKLKGYLTIDQEDSVLK |
| | | | | | | | | | AVYHGETSLENGIKFEVTGTLNELQNQLNRSTASL |
| | | | | | | | | | SQEQEKRLAQTIQFTEKIDEAKENKKFIQTIAAGAL |
| | | | | | | | | | GFFLYMILITYAGVTAQEVASEKGTKIMEVVFSSIR |
| | | | | | | | | | ASHYFYARMMALFLVILTHIGIYVVGGLAAVLLFK |
| | | | | | | | | | DLPFLAQSGILDHLGDAISLNTLLFILISLFMYVVLA |
| | | | | | | | | | AFLGSMVSRPEDSGKALSPLMILIMGGFFGVTALG |
| | | | | | | | | | AAGDNLLLKIGSYIPFISTFFMPFRTINGYAGGAEA |
| | | | | | | | | | WISLAITVIFAVVATGFIGRMYASLVLQTDDLGIWK |
| | | | | | | | | | TFKRALSYK |
| 137 | peg.0796 | n/a | 0.083 | 6 | CHO | | | pts system | MDYSKVAAEVIEAVGKDNLVAAAHCATRLRLVL |
| | | | | | transport | | | | KDEAKVNQAALDNNADVKGTFSTNGQYQIIIGPGD |
| | | | | | | | | | VNFVYAEIIKKTGLKEVSTDDLKEIANKDKKFNPL |
| | | | | | | | | | MDLIKLLSDIFVPIIPALVAGGLLMALRNFLTSPDLF |
| | | | | | | | | | GPQSIEDMYPAIKGFSAMIQLMSAAPFMFLPVLVGI |
| | | | | | | | | | SAAKRFGANQFLGAAIGMIMTTPDLGGKEAFWDIL |
| | | | | | | | | | GFHVTQTNYAYQVIPVLVAVWLLANLEKFFHKKL |
| | | | | | | | | | PSAVDFTFTPLLSVMITGFLTFTVIGPVMLVVSDAIT |
| | | | | | | | | | NAIVWLYNTTGAFGMGLFGGTYSLIVMTGLHQSFP |
| | | | | | | | | | AIETQLLSAYNNNGTGFGDYIFVVASMANVAQGA |
| | | | | | | | | | ATLAVYFLTKNAKTKGLSSSAAVSAFLGITEPALFG |
| | | | | | | | | | VNLKYKFPFFCALAGSAIGAFVAGLTHVIAVSLGA |
| | | | | | | | | | AGFIGFLSIKAGSIPMYIIAEIMSFVAAFAFTYFYGK |
| | | | | | | | | | TKAASVFADEAATATAETVTEPTVEAPVVEETDTL |
| | | | | | | | | | QNETLVTPIVGDVVALADVNDPVFSSGAMGQGIA |
| | | | | | | | | | VKPSQGVVYAPADAEVSIAFPTGHAFGLKTRNGAE |
| | | | | | | | | | VLIHVGIDTVSMNGDGFEAKVAQGNKVKAGDVLG |
| | | | | | | | | | TFDSNKIAAAGLDDTTMVIVTNTADYASVAPVAT |
| | | | | | | | | | GSVAKGDAVIEVKI |
| 138 | peg.0867 | n/a | 0.083 | 6 | transport | | | Sulfite exporter | VVEIIYFLIIIIASGLGSISGMGGGIIIKPLMDSFGYH |
| | | | | | | | | TauE/SafE | SVSDIAFYSSFSVFIMAIISTTKRFSQSKEIKWRLIFT |
| | | | | | | | | | VSFSSVLGGFLGHLIFQVLLSQLSVRLVSIVQMILLFV |
| | | | | | | | | | MLLVSFVLTDFKKTYQFDKIGFYMICGLLLGLISSF |
| | | | | | | | | | LGIGGGPLNVSLLMVFFSISIKEATMYSLAIIFFSQLS |
| | | | | | | | | | HLATIVVVTGLNQYHLAPVPVIFLASICGGVLGTV |
| | | | | | | | | | VSKVLPENWVRYCFKGMLFFVMGMTLYNLFHIL |
| 139 | peg.0870 | n/a | 0.083 | 6 | CHO | | | PTS system | MNTMLDKMQEKLSPIAMKVGNQKFLVALRDSFV |
| | | | | | transport | | | | GTMPVIMTGSIALLLNAFLVDLPQQFHLESITKTFQ |
| | | | | | | | | | WLVDINNLVFKGSIPIVSLLFIYCLGVNIAKIYKVDT |
| | | | | | | | | | VSAGLVSLASFVISIGSTVTKSFPLANVGDVKLDQI |
| | | | | | | | | | LQGIDNLAFDGKNLMVTIGNVIPGNHINARGYFTA |
| | | | | | | | | | MMIGFLASIIFCKVMKKNWVIKLPDSVPPAlAKPFT |
| | | | | | | | | | SIIPGFMAMYIVAILTYVFHLLSNDLLIDWVYKVLQ |
| | | | | | | | | | TPLLGLSQSFFAVILMIFLNKLFWFFGLHGGNVLAP |
| | | | | | | | | | IMEGLFGVAMLANLDAFQKGEPIPYIWTSGSFGAF |
| | | | | | | | | | VWFGGLGLVLAILIFSRNSHYRKVAKLGLAPVLFNI |
| | | | | | | | | | GEPVNYGLPVVLNPLLFIPFVLSPVFMATVAYWAT |
| | | | | | | | | | SWGLVSPVTQNVTWVMPPILYGFFSTAFDWRAIIL |
| | | | | | | | | | SVVCLIISVLTYFPFVKMAYKTELS |
| 140 | peg.0889 | SP_1823 | 0.083 | 6 | Metal | | | MgtC SapB family | MTATSLGLSNIEIVVRIVLSVVIGSIIGLERGSKSQPA |
| | | | | | transport | | | protein | GIRTYSIVCLAACLIMMTNEYVSYKFGTGDPTRLG |
| | | | | | | | | | AQVISGVGFLGAGTILITDKKKITGLTTAAGIWASA |
| | | | | | | | | | GIGLAIGVGFYEGALLVAISVWGVISMFQPLKKYL |
| | | | | | | | | | QNRSKMIELYIVVKSTEAYNRVLVYCAENGIRMTD |
| | | | | | | | | | SRTAFGDVNSDRIEYFDVPDKKIASFITLELSGRFEH |
| | | | | | | | | | LRLMEEIANIVGVIYVEEIS |
| 141 | peg.0893 | SP_1827 | 0.083 | 6 | regulation | | | Domain of unknown | MKNLTKIKFKENGEFNHFSGNTVVANLYTKQDLM |
| | | | | | | | | function (DUF1868) | EVVDIIQSRYRELPFIDKFTLTPRNSIHMTVIELLCH |
| | | | | | | | | | ENRETEFWSSNLPLDTPLQEIHDYFAKQLEIFPLLD |
| | | | | | | | | | EEIHMRITEMGKQNILVEPADEASAKRLEEIRTYVS |
| | | | | | | | | | EKAGVCFPNHDRYQFHISIGYLRIPLTEEEEEEFTKV |
| | | | | | | | | | RAELTEILLEKIPTITVNRIDYTVFEDMRQFVPYHEK |
| | | | | | | | | | FK |
| 142 | peg.0916 | SP_1850 | 0.083 | 6 | restriction | | | Type II restriction | MELHFNLELVETYKSNSQKARILTEDWVYRQSYCP |
| | | | | | | | | | NCGNNPLNHFENNRPVADFYCNHCSEEFELKSKK |
| | | | | | | | | | GNFSSTINDGAYATMMKRVQADNNPNFFFLTYTK |
| | | | | | | | | | NFEVNNFLVLPKQFVTPKSIIQRKPLAPTARRAGWI |
| | | | | | | | | | GCNIDLSQVPSKGRIFLVQDGQVRDPEKVTKEFKQ |
| | | | | | | | | | GLFLRKSSLSSRGWTIEILNCIDKIEGSEFTLEDMYR |
| | | | | | | | | | FESDLKNIFVKNNHIKEKIRQQLQILRDKEIIEFKGR |
| | | | | | | | | | GKYRKL |
| 143 | peg.1041 | SP_1952 | 0.083 | 6 | Protein | | | NA | MLKILNNSVIYLCLIPLLFLLLIIFPNDSLIYYFRLIL |
| | | | | | processing | | | | ISLISITLHELGHFLVGRCLSYKLEMLATPFFFYFRKK |
| | | | | | | | | | IYFKFPVLLAFGYCQMSNRNITNEKNSDRNLVFYFF |
| | | | | | | | | | GGGGANLIVAILALLGFVPYASEFFILNIILFLVTVC |
| | | | | | | | | | LPIDGTDGNAIREIVLYSKDSKTYQRFFANSLYNNP |
| | | | | | | | | | YITIDDFAKLTSKEKSFFSKFEKCLINLYFEVKGEGS |
| | | | | | | | | | AFTIANHEVFDSNIQENIIHEYYKLLHKSSDWIIPQN |
| | | | | | | | | | LSLEEVVFTLSNYIYSKNNKYLEKIKYLKKLVDFR |
| | | | | | | | | | QEEIIDFILNKEEVL |
| 144 | peg.1145 | SP_2058 | 0.083 | 6 | translation | | Yes | Exchanges the | MSDSPIKYRLIKKEKHTGARLGEIITPHGTFPTPMF |
| | | | | | | | | guanine residue with | MPVGTQATVKTQSPEELKEMGSGIILSNTYHLWLR |
| | | | | | | | | 7-amino methyl-7- | PGDELIARAGGLHKFMNWDQPILTDSGGFQVYSLA |
| | | | | | | | | deazaguanine in | DSRNITEEGVTFKNHLNGSKMFLSPEKAISIQNNLG |
| | | | | | | | | tRNAs with GU(N) | SDIMMSFDECPQFYQPYDYVKKSIERTSRWAERGL |
| | | | | | | | | anticodons (tRNA- | KAHRRPHDQGLFGIVQGAGFEDLRRQSAHDLVSM |
| | | | | | | | | Asp, -Asn, -His and | DFSGYSIGGLAVGETHEEMNAVLDFTTQLLPENKP |
| | | | | | | | | -Tyr). After this | RYLMGVGAPDSLIDGVIRGVDMFDCVLPTRIARNG |
| | | | | | | | | exchange, a | TCMTSQGRLVVKNAQFAEDFTPLDPECDCYTCNN |
| | | | | | | | | cyclopentendiol | YTRAYLRHLLKADETFGIRLTSYHNLYFLLNLMKQ |
| | | | | | | | | moiety is attached | VRQAIMDDNLLEFREYFVEKYGYNKSGRNF |
| | | | | | | | | tot he 7-aminomethyl | |
| | | | | | | | | group of 7- | |
| | | | | | | | | deazaguanine, | |
| | | | | | | | | resulting in the | |
| | | | | | | | | hypermodified | |
| | | | | | | | | nucleoside queuosine | |
| | | | | | | | | (Q) (7-(((4,5-cis- | |
| | | | | | | | | dihydroxy-2- | |
| | | | | | | | | cyclopenten-1- | |
| | | | | | | | | yl)amino)methyl)-7- | |
| | | | | | | | | deazaguanosine) (By | |
| | | | | | | | | similarity) | |
| 145 | peg.1174 | SP_2085 | 0.083 | 6 | transport | | | phosphate abc | MSKYLLKLLVYCFSALTFGSLFLIIGFILIKGLPHLSL |
| | | | | | | | | transporter | SLFSWTYTSENISLMPAIISTVILVFGALLLALPIGIF |
| | | | | | | | | | AGFYLVEYTKKDSLCVKIMRLASDTLSGIPSIVFGL |
| | | | | | | | | | FGMLFFVVFLGFQYSLLSGILTSVIMVLPVIIRSTEE |
| | | | | | | | | | ALLSVSDSMRQASYGLGAGKLRTVFRIVLPVAMP |
| | | | | | | | | | GILAGVILAIGRIVGETAALMYTLGTSTNTPSSLMS |
| | | | | | | | | | SGRSLALHMYMLSSEGLHVNEAYATGVILIITVLMI |
| | | | | | | | | | NTLSSLLSRKLVKGAS |
| 146 | peg.1194 | SP_2108 | 0.083 | 6 | transport | | | extracellular solute- | MSSKFMKSTAVLGTVTLASLLLVACGSKTADKPA |
| | | | | | | | | binding protein | DSDSSEVKELTVYVDEGYKSYIEEVAKAYEKEAG |
| | | | | | | | | family 1 | VKVTLKTGDALGGLDKLSLDNQSGNVPDVMMAP |
| | | | | | | | | | YDRVGSLGSDGQLSEVKLSDGAKTDDTTKSLVTA |
| | | | | | | | | | ANGKVYGAPAVIESLVMYYNKDLVKDAPKTFADL |
| | | | | | | | | | ENLAKDSKYAFAGEDGKTTAFLADWTNFYYTYGL |
| | | | | | | | | | LAGNGAYVFGQNGKDAKDIGLANDGSIAGINYAK |
| | | | | | | | | | SWYEKWPKGMQDTEGAGNLIQTQFQEGKTAAIID |
| | | | | | | | | | GPWKAQAFKDAKVNYGVATIPTLPNGKEYAAFGG |
| | | | | | | | | | GKAWVIPQAVKNLEASQKFVDFLVATEQQKVLYD |
| | | | | | | | | | KTNEIPANTEARSYAEGKNDELTTAVIKQFKNTQP |
| | | | | | | | | | LPNISQMSAVWDPAKNMLFDAVSGQKDAKTAAN |
| | | | | | | | | | DAVTLIKETIKQKFGE |
| 147 | peg.1276 | SP_2186 | 0.083 | 6 | CHO | | | Key enzyme in the | MSQEKYIMAIDQGTTSSRAIIFNKKGEKVSSSQKEF |
| | | | | | metabolism | | | regulation of | TQIFPQAGWVEHNANEIWNSVQSVIAGAFIESGVK |
| | | | | | | | | glycerol uptake and | PNQIEAIGITNQRETTVVWDKKTGLPIYNAIVWQSR |
| | | | | | | | | metabolism (By | QTAPLAEQLKSQGYVEKFHEKTGLIIDAYFSATKV |
| | | | | | | | | similarity) | RWILDHVEGAQERAEKGELLFGTIDTWLVWKLTD |
| | | | | | | | | | GAAHVTDYSNAARTMLYNIKELKWDDEILEILNIP |
| | | | | | | | | | KAILPEVRSNSEIYGKTAPFHFYGGEVPISGMAGDQ |
| | | | | | | | | | QAALFGQLAFEPGMVKNTYGTGSFIIMNTGEEMQL |
| | | | | | | | | | SENNLLTTIGYGINGKVYYALEGSIFIAGSAIQWLR |
| | | | | | | | | | DGLRMVENSPESEKYARDSHNNDEVYVVPAFTGL |
| | | | | | | | | | GAPYWNQNARGSVFGLTRGTSKEDFIKATLQSIAY |
| | | | | | | | | | QVRDIIDTMQVDTQTAIQVLKVDGGAAMNNFLMQ |
| | | | | | | | | | FQADILGIDIARAKNLETTALGAAFLAGLSVGYWK |
| | | | | | | | | | DLDELKLLNETGELFEPSMNESRKEQLYKGWKKA |
| | | | | | | | | | VKATQVFAEVDD |
| 148 | peg.1280 | n/a | 0.083 | 6 | adhesin | PspC | | NA | MRYSIRKFSVGVASVAVASLFMGSVVHATEKEGS |
| | | | | | | | | | TQAATSFNRGNGSQIERRKAAEQAIVSLSGYMTSL |
| | | | | | | | | | LNDGLDTSDSRFEELLKRAKGIVEEYRKKIDGASD |
| | | | | | | | | | REKIEKLQQEGQTKLDELVDKFKKGLSSSEQNGHA |
| | | | | | | | | | TPKDPSRNDGVQGDDSSVGQGEQPGASNQKNPES |
| | | | | | | | | | VPPTASGETDSPTKPKTSNDSVNSLERELKEVKETA |
| | | | | | | | | | KTTLNTYMLTRLKQENPGVFWFADLLRESKESVE |
| | | | | | | | | | KYKRMFDEASSKENVENLVKEAKQEIEALVVKHK |
| | | | | | | | | | GREIDLERTKAKTVIAKYLTGLLDDIKKNLKKEQHI |
| | | | | | | | | | NTVELIKKLGDIKRTYLYKLDESTQKAQLQELVTE |
| | | | | | | | | | SQSKLDEAFSKFKNGLSSSSSSGSSTKPETPQPEKPE |
| | | | | | | | | | HQKPTTPAPDTKPSPQPEGKKPSVPDINQEKEKAKL |
| | | | | | | | | | AVATYMSKILDDIQKHHLQKEKHRQIVALIKELDE |
| | | | | | | | | | LKKQALSEIDNVNTKVEIENTVHKIFADMDAVVTK |
| | | | | | | | | | FKKGLTQDTPKEPGNKKPSAPKPGMQPSPQPEVKP |
| | | | | | | | | | QLEKPKPEVKPQPEKPKPEVKPQLEKPKPEVKPQPE |
| | | | | | | | | | KPKPEVKPQLEKPKPEVKPQLEKPKPEVKPQPEKP |
| | | | | | | | | | KPEVKPQLEKPKPEVKPQPEKPKPEVKPQLEKPKPE |
| | | | | | | | | | VKPQPEKPKPEVKPQLEKPKPEVKPQLEKPKPEVK |
| | | | | | | | | | PQLEKPKPEVKPQPEKPKPEVKPQLEKPKPEVKPQP |
| | | | | | | | | | EKPKPEVKPQPEKPKPEVKPQLEKPKPDNSKPQAD |
| | | | | | | | | | DKKPSTTNNLSKDKQPSNQASTNEKATNKPKKSLP |
| | | | | | | | | | STGSISNLALEIAGLLTLAGATILAKKRMK |
| 149 | peg.1327 | SP_2233 | 0.083 | 6 | phage | | | domain protein | MESNLKKTTFIIVMIGISLIPALYNIIFLSSMWDPYG |
| | | | | | | | | | QLSDLPVAVVNNDKEASYNGNTMAIGKDMVSNL |
| | | | | | | | | | KENKTLDFHFVDEEEGKKGLEDGDYYMVVTLPSD |
| | | | | | | | | | LSEKATTLSNIQSTAAYQSLTSEQQTEISDSVSQNST |
| | | | | | | | | | DSIQSAQSIVALVQDLQGSLENLQNQSSNLSTLKNQ |
| | | | | | | | | | ANQVLPITSTSLIGLSSGLTEIQGAVTSKLVPASQSI |
| | | | | | | | | | ASGVNAYTTGVDKVSQGASQLSEKNATLTGSLDQ |
| | | | | | | | | | LVSGSNTLTQKSSSLTAGVGQLVEKTPELVSGIEKL |
| | | | | | | | | | STGSN |
| 150 | peg.1329 | n/a | 0.083 | 6 | phage | | | transposase IS116 | MKCFVGLDISSTKLDVCIMLSDTSTPVTASLSNDLS |
| | | | | | | | | IS110 IS902 family | GATEIKNHILDLNHTYHFERIVIGMEATSLYSFHPA |
| | | | | | | | | protein | MFFHEDRQLKELHVEIMVEQPNKIKKYRDAFEENK |
| | | | | | | | | | NDTIDAFYIADYFRIERFSPSFLKEEKYMALQHLTR |
| | | | | | | | | | TRLQIIEQLTRTKQHFIENIYYKCNTLAYQFKKEELS |
| | | | | | | | | | TNLWSSTMMTLMTDEMTLDELANMPLQELDDWL |
| | | | | | | | | | QKLGKGHFKDSEKLAQTIQAAIRGSYRLSKLQQDS |
| | | | | | | | | | VNVILGLLAREIRNLEKMIKEIDKAIEDMVETIPEYQ |
| | | | | | | | | | CLTSIPGVGKVYAAGIIAEIGQIERFKDHPQVAKFA |
| | | | | | | | | | GLNWREKQSGNSNSQHTSLVNRGNRYLRYYLVEA |
| | | | | | | | | | ANSVRRYDDEYKDFYKKKYHEVPKHQHKRAILLT |
| | | | | | | | | | ARKFVRLVDVLLRNHQLYTPPRRIMEDN |
| 151 | peg.1427 | SP_0091 | 0.083 | 6 | CHO | | | Binding-protein- | MAKKKIKKEKIDNVGIHSFSKKADIFFSIISGLIALSC |
| | | | | | transport | | | dependent transport | ILPFVFVIIISVTDEKSLLQYGYSFFPSQFGLDGFEFL |
| | | | | | | | | systems, inner | AQFKDKILQALFISVFVTVVGTLTNVFITTTYAYAIS |
| | | | | | | | | membrane | RTTFKYRRFFTIFVLLSMLFNAGLVPGYIMVTRVLQ |
| | | | | | | | | component | LGDTVWALIVPMLLSPFNIILMRSFFKKTIPEAILES |
| | | | | | | | | | ARIDGASEARIFFQICLPLSLPGIATITLLTALGFWN |
| | | | | | | | | | DWFNALLYIKSDNLYPLQYLLMQIQQNMDYIAKA |
| | | | | | | | | | VGLTGQLGVALPKETGRMAMVVVATLPIAILYPFF |
| | | | | | | | | | QRYFVKGLTIGGVKE |
| 152 | peg.1454 | n/a | 0.083 | 6 | unknown | | | NA | MKDDQKYLLAGLYSLLVAIFYFPLIESKGIFVSILM |
| | | | | | | | | | AVLLLYLIYFIGTVIHIVIIKFIRKKSFKYLVLYPFTY |
| | | | | | | | | | DGSWRFQPINLLYFPEMVRDVIPINLVQEYCQGQP |
| | | | | | | | | | YGLLKKMLKRIRLSREIALLLATVIVYFFTHRILPLS |
| | | | | | | | | | VFTFIFSYILLFAQSYLGGNTVWIGNRRLIIDDEFEKI |
| | | | | | | | | | LLSKSYIKEISSARYSEYLTCEYKNFTPIILLAIFENL |
| | | | | | | | | | LDSYLIQNQSKVDLDIFYKVLPLLYKEKYTMGFNY |
| | | | | | | | | | FVSLNYLLYKVGFLGIIYDNEALRDLSKQYLNKNIS |
| | | | | | | | | | ELQDGSFEGGIQDAVASKQIVVINEFIACLNSRCVP |
| | | | | | | | | | SQYDRFFYKDRPYIFSRKSPIKG |
| 153 | peg.1497 | SP_0156 | 0.083 | 6 | regulation | | | regulatoR | MYKVLLVDDEYMVTEGLKRLIPFDKWDMEVVAT |
| | | | | | | | | | ASHADEALEYVQENPVDVIISDVNMPDKTGLDMIR |
| | | | | | | | | | EMKEILPDAAYILLSGYQEFDYVKRAMNLSVVDY |
| | | | | | | | | | LVKPVDKVELGNLLEKIAGQLGERGKKSQTLSQEL |
| | | | | | | | | | DEAGFVSYLGDKENWWIGLSKEKQGSFTIPYYVLG |
| | | | | | | | | | QDWQIFISDQPLDGLVVTPFEAPYQEHFERWKLNA |
| | | | | | | | | | EKTLFYGSVNLQQSESLFAYYEPIYRVIIQGNLNQI |
| | | | | | | | | | VEELNLLEKVVLENTPRVPITKQLFIQFVMDVFHLF |
| | | | | | | | | | EHLKADDLTDIVKTIHAIQSFDELVPYIKETLTSFFG |
| | | | | | | | | | QYRMNENVVSVLEVIGRDYQKELSLKDISKALFIN |
| | | | | | | | | | PVYLGQLIKRETDSTFAELLNKQRIKAAQQLLLSTS |
| | | | | | | | | | DSIEDICYAVGYSNLGYFYKVFRKLCGKSPKAYRK |
| | | | | | | | | | QVETIL |
| 154 | peg.1506 | SP_0165 | 0.083 | 6 | bacteriocin | | | Flavoprotein | MDKKNLLVLVTGSVGASNVDTYLYYIKKFYNVKV |
| | | | | | | | | | ILSENSKKFISKELISYFCDKVYDEIFVEEVVPHVFL |
| | | | | | | | | | PYESDLLLILPATANVIGKIANGIADDLVTATVLNF |
| | | | | | | | | | NKKIIFCPNMNSTMWDNHIVQRNVSILKELGHIFLF |
| | | | | | | | | | ESKKTYEVGLRKAIDSTCSMLQPQSLVKELIKLENI |
| | | | | | | | | | VLEEGH |
| 155 | peg.1521 | SP_0182 | 0.083 | 6 | bacteriocin | | | peptidase U61 LD- | MVSTIGIVSLSSGIIGEDFVKHEVDLGIQRLKDLRLN |
| | | | | | | | | carboxypeptidase A | PIFLPHSLKGLDFIKDHPEARAEDLIHAFSDDSIDMI |
| | | | | | | | | | LCAIGGDDTYRLLPYLFENDQLQKVIKQKIFLGFSD |
| | | | | | | | | | TTMNHLMLHKLGIKTFYGQSFLADICELDKEMLA |
| | | | | | | | | | YSLHYFKELIETGRISEIRPSDIWYEERTDFSPTALG |
| | | | | | | | | | TPRVSHTNTGFDLLQGRAQFEGKILGGCLESLYDIF |
| | | | | | | | | | DNSRYADSTELCQKYKLFPDLSDWEGKILLLETSE |
| | | | | | | | | | EKPKPEDFKKMLLTLKDTGIFAVINGLLVGKPMDE |
| | | | | | | | | | TFHDDYKEALLDIIDSNIPIIYNLNVGHATPRAIVPF |
| | | | | | | | | | GVHAHVDAQEQVIRFDYNK |
| 156 | peg.1598 | SP_0267 | 0.083 | 6 | regulation | | | Luciferase-like | MVELGISTFGEITELEGTGQTYSHAERIRQLVAEIEL |
| | | | | | | | | | ADKVGLDVYGIGEHHRADFAVSAPEIVLAAGAVN |
| | | | | | | | | | TKKIRLTSAVSILSSMDPIRLFQQYATIDALSNGRSE |
| | | | | | | | | | IMAGRGSFTESFPLFGYDLKDYDSLFDEKLDLLQL |
| | | | | | | | | | VNEKTKLDWQGRLTQTIAGKEVYPRPVQDKLPLW |
| | | | | | | | | | IATGGHVESTVKIAQAGLPIVYAIIGGNPRYFKKLIQ |
| | | | | | | | | | AYREIGSEAGHADKDLKVGAHSWGWIAEDGEQA |
| | | | | | | | | | VKDYFHPTKQVVDAISKDRPHWQELRYEQYLEQV |
| | | | | | | | | | GPNGAMFVGNPDQVAEKLIRMIEDLGLDRFMLHL |
| | | | | | | | | | PLGSMPHDQVLRAIELFGTQVAPKVRAYFAMKEA |
| 157 | peg.1615 | SP_0285 | 0.083 | 6 | CHO | | | alcohol | MKAVVVNPESTGVAIEEKVLRPLETGEALVEVEYC |
| | | | | | metabolism | | | dehydrogenase | GVCHTDLHVAHGDFGQVPGRVLGHEGIGIVKEIAP |
| | | | | | | | | | DVKSLKVGDRVSVAWFFEGCGTCEYCTTGRETLC |
| | | | | | | | | | RTVKNAGYSVDGGMAEQCIVTADYAVKVPDGLD |
| | | | | | | | | | PAQASSITCAGVTTYKAIKEAKVEPGQWVVLYGA |
| | | | | | | | | | GGLGNLAVQYAKKVFNAHVIAVDINNDKLALAKE |
| | | | | | | | | | VGADIVINGLEVEDVAGLIKEKTDGGAHSAVVTAV |
| | | | | | | | | | SKVAFNQAVDSVRAGGRVVAVGLPSETMELSIVK |
| | | | | | | | | | TVLDGIQVIGSLVGTRKDLEEAFQFGAEGLVVPVV |
| | | | | | | | | | QKRPVEDAVAIFDEMEKGQIQGRMVLDFTH |
| 158 | peg.1638 | n/a | 0.083 | 6 | CHO | | | esterase | MSYIQLDFHSHSLNRNVNLNIFLPDGELLPAPEQPY |
| | | | | | metabolism | | | | PTIYFLPGFSASGKELSTFLHFRTQCLLNGIAVVIPD |
| | | | | | | | | | GDNSFYLDKPERLALYSQYVSQELIDYTCSILPLSH |
| | | | | | | | | | KREETYIGGISMGGYGALVHGFRYPEKFGKIVALS |
| | | | | | | | | | PAIDVAAILNGNASQFGTTFADLFKTEEDYYSSTDH |
| | | | | | | | | | PVNALKELLDKGEDIPELFIACGFQDELVYASNRSF |
| | | | | | | | | | AEELEKLGVNLTYIEDDGGHDVFFWDKYLPAVFEF |
| | | | | | | | | | LRK |
| 159 | peg.1662 | SP_0313 | 0.083 | 6 | metabolism | | | Glutathione | MTSLYDFSVLNQNNQATPLDSYRGKVLLIVNTATG |
| | | | | | | | | peroxidase | CGLTPQYQGLQELYERYQDQGFEILDFPCNQFMGQ |
| | | | | | | | | | APGSAEEINAFCSLHFQTTFPRFAKIKVNGKEADPL |
| | | | | | | | | | YVWLKDQKSGPLGKRVEWNFAKFLIGRDGQVFER |
| | | | | | | | | | FSSKTDPKQIEEAIQTLL |
| 160 | peg.1686 | SP_0338 | 0.083 | 6 | Protein | | | ATP-dependent Op | MNNNFNNFNNMDDLFNQLMGGMRGYSSENRRYL |
| | | | | | processing | | | protease ATP- | INGREVTPEEFAHYRATGQLPGNAETDVQMPQQA |
| | | | | | | | | binding subunit | SGMKQDGVLAKLGRNLTAEAREGKLDPVIGRNKE |
| | | | | | | | | | IQETSEILSRRTKNNPVLVGDAGVGKTAVVEGLAQ |
| | | | | | | | | | AIVNGDVPAAIKNKEIISIDISGLEAGTQYRGSFEEN |
| | | | | | | | | | VQNLVNEVKEAGNIILFFDEIHQILGAGSTGGDSGS |
| | | | | | | | | | KGLADILKPALSRGELTVIGATTQDEYRNTILKNAA |
| | | | | | | | | | LARRFNEVKVNAPSAENTFKILQGIRDLYQQHHNV |
| | | | | | | | | | ILPDEVLKAAVDYSVQYIPQRSLPDKAIDLVDVTA |
| | | | | | | | | | AHLAAQHPVTDVHAVEREIETEKDKQEKAVEAED |
| | | | | | | | | | FEAALNYKTRIAELEKKIENHTEDMKVTASVNDVA |
| | | | | | | | | | ESVERMTGIPVSQMGASDIERLKDMAHRLQEKVIG |
| | | | | | | | | | QDKAVEVVARAIRRNRAGFDEGNRPIGSFLFVGST |
| | | | | | | | | | GVGKTELAKQLALDMFGTQDAIIRLDMSEYSDRT |
| | | | | | | | | | AVSKLIGTTAGYVGYDDNSNTLTERVRRNPYSIILL |
| | | | | | | | | | DEIEKADPQVITLLLQVLDDGRLTDGQGNTVNFKN |
| | | | | | | | | | TVIIATSNAGFGYEANLTEDADKPELMDRLKPFFRP |
| | | | | | | | | | EFLNRFNAVIEFSHLTKEDLSKIVDLMLAEVNQTLA |
| | | | | | | | | | KKDIDLVVSQAAKDYITEEGYDEVMGVRPLRRVV |
| | | | | | | | | | EQEIRDKVTDFHLDHLDAKHLEADMEDGGLVIRE |
| | | | | | | | | | KS |
| 161 | peg.1741 | SP_0391 | 0.083 | 6 | adhesin | CbpF | | choline binding | MKLLKKMMQVALATFFFGLLGTSTVFADDSEGW |
| | | | | | | | | protein | QFVQENGRTYYKKGDLKETYWRVIDGKYYYFDPL |
| | | | | | | | | | SGEMVVGWQYIPAPHKGVTIGPSPRIEIALRPDWFY |
| | | | | | | | | | FGQDGVLQEFVGKQVLEAKTATNTNKHHGEEYDS |
| | | | | | | | | | PAEK |
| 162 | peg.1831 | SP_0488 | 0.083 | 6 | regulation | | Yes | PAP2 Family | MKGSFALLLFVILGYMVKFYPEMLVNFDQSIQTAI |
| | | | | | | | | | RGDLPDYLTILFRALTRLIDIPVIITWVVITAFVFYR |
| | | | | | | | | | KRWKIESFFMLGNLALAGLLIVTFKNIYQRPRPAIL |
| | | | | | | | | | HLVEEKGFSFPSGHSLAVTLMVGTLIVILSQRIKNP |
| | | | | | | | | | VWRKIVQIVLGLYLVSVLVSRVYLGVHYPSDVLAS |
| | | | | | | | | | LCVGLGVLFIEFPFYDKLRFQWRFKGKQK |
| 163 | peg.1915 | SP_0582 | 0.083 | 6 | nuclease | | | NA | MIKTFLSALSVILFVIPIITYSFFPSSNLNIWLSTRP |
| | | | | | | | | | ILAQIYAFPLATATMAAILSFVFFSLSFYKKNKQIRFY |
| | | | | | | | | | SGILLLLSLILLLFGTDKTLSSASNKTKTLKLVTWN |
| | | | | | | | | | VANQIEAQHIERIFSHFDADMAIFPELATNIRGEQE |
| | | | | | | | | | NQRIKLLFHQVGLSMANYDIFTSPPTDSGIAPVTVI |
| | | | | | | | | | VKKSYDFYTKAETFHTTRFGTIVLHSRKQDIPDIIAL |
| | | | | | | | | | HTAPPLPGLMEIWKQDLNIIHNQLASKYPKAIIAGD |
| | | | | | | | | | FNATMRHGALAKISSHRDALNALPPFERGTWNSQS |
| | | | | | | | | | PKLFNATIDHILLPKNHYYVKDLDIVSFQNSDHRCI |
| | | | | | | | | | FTEITF |
| 164 | peg.2014 | SP_0686 | 0.083 | 6 | bacteriocin | | | bacteriocin- | MKKLFILLSTFFLSFFLAWIIVLRAPQYLYASYDSVS |
| | | | | | | | | associated integral | LLRVKKDTQEPTREVFEQELENFANSEQSLIARRIV |
| | | | | | | | | membrane protein | EPSKDGTTHFTYATYGQGTLPKEFQEASQESRERS |
| | | | | | | | | | DPLNSYLLLSGSLTKEKLADKLGDLGYKASADRKI |
| | | | | | | | | | PPYFLAFRILLNPLILISLAIFGLSFFALVIITRIKEM |
| | | | | | | | | | RAAGIKLFSGQTLLSIMGHSLSTDIKWLLLSALLSFL |
| | | | | | | | | | GGGVVLFSQGLFYPILLATYGFGISFYLLFLLAISILL |
| | | | | | | | | | MLLYLMSLNYKALVPVIKGRLPLKRLMILTLLCQL |
| | | | | | | | | | VAVFTVGYAVKTGLTSYQRLKELEISKQAWQDRA |
| | | | | | | | | | DYYQISFGLGDRGKDTENQSKWYAFAKEAIEEEQ |
| | | | | | | | | | ALYVKDNLLHFANPQGKNEQGETLDTYSPDANTL |
| | | | | | | | | | YVSPSYLDKEKVVVDAETKQKLAHLQKGEFILLLP |
| | | | | | | | | | EHLRSREVELKKVFEERLSYYGKSGEEASAPLDYE |
| | | | | | | | | | MKAHVSYLSMGEKRFVYNNGENPVSTQYLTDPIL |
| | | | | | | | | | VVFTPTSTGDSFISLSSWSINAGKQLFIKGYESGLEL |
| | | | | | | | | | LKKVGIYEQVSYLKEGRSVYLTRYNEVQTETATLI |
| | | | | | | | | | LGAIVGIASSLLLFYSVNLLYFEQFRRDILIKRISGLR |
| | | | | | | | | | FFETHAQYMVSQFASFVFGASLFILSSRDLVIGLLT |
| | | | | | | | | | LLVFLASAVLTLYRQAQKESRVSMTIMKGK |
| 165 | peg.2025 | SP_0698 | 0.083 | 6 | transport | | | NA | MLKRFLALVWLRCQIILSNKSILLQVLVPFAFTYFY |
| | | | | | | | | | KYLMETQGKVNDQQALVLLMMCLPFSLALAVGSP |
| | | | | | | | | | ITIILSEEKEKYNLQTLLLSGVKGSEYILSTMFLPFLL |
| | | | | | | | | | TFVIMGTTPLILGVTIVHTFNYITIVLLTSLSIILFYL |
| | | | | | | | | | LIGLTAKSQVVAQVISLPAMILVAFLPMLSGLDKTV |
| | | | | | | | | | AKITDYSFMGLFTKFFTKWEGFSWNETLIPNLTLLI |
| | | | | | | | | | WIVLLLTLITITIRKKKIS |
| 166 | peg.2046 | SP_0720 | 0.083 | 6 | transport | | | ABC transporter, | MGLELRAIQSPIFSEPFDFTFHAQAFTLLVGSSGSGK |
| | | | | | | | | ATP-binding protein | SSLFQVIAQVSSLPYSGQVLIDGSEVSQLSIIARVQK |
| | | | | | | | | | VGILFQNPNHQFTMENLFEELIFTLENIGYHLQEIDS |
| | | | | | | | | | KIAEVVQQCRCEAILHRPIHHLSGGEKQKAALAVL |
| | | | | | | | | | FAMNPRVYLLDEPFASIDRKSRIEILEILKELALDGK |
| | | | | | | | | | TVILCDHDLSDYKAYIDHMVELRDGKLREVFQIPS |
| | | | | | | | | | YEMTQVASKEVASSPELFHMNRVTGELGNRPLFSI |
| | | | | | | | | | ADFTFYQGISCILGDNGVGKSTLFRSILQFQKYKGR |
| | | | | | | | | | IAWKGTVLKKKKSLYRDLTGVVQEAEKQFIRVSLR |
| | | | | | | | | | EELQLDGPDSERNQRIFQALRYFDLEQAVDKSPYQ |
| | | | | | | | | | LSGGQQKILQLLTILTSKASVILLDEPFAGLDDRAC |
| | | | | | | | | | HYFCKWIVEERNQGRSFLLISHRLDPLISVVDYWIE |
| | | | | | | | | | MTSQGLRHVKEVTITKPLTSQSSNTQGEVR |
| 167 | peg.2055 | SP_0729 | 0.083 | 6 | Metal | | Yes | p-type ATPase | MTEIVKASLENGIQKIRIRSEKGYHPAHIQLQKGIPA |
| | | | | | transport | | | | EITFHRATPSNCYKEILFEEEGILEPIGVDEEKVIRFT |
| | | | | | | | | | PQELGRHEFSCGMKMQKGSYTVVEKTRKSLSLLQ |
| | | | | | | | | | RFWITSIFTVPLVILMIGMLTGSISHQVMHWGTFLA |
| | | | | | | | | | TTPIMLVAGKPYIQSAWASFKKHNANMDTLVALG |
| | | | | | | | | | TLVAYFYSLVALFAGLPVYFESAGFILFFVLLGAVF |
| | | | | | | | | | EEKMRKNTSQAVEKLLDLQAKTAEVLSDDSYVQV |
| | | | | | | | | | PLEQVKVGDLIRVRPGEKIAVDGVVVEGVSSIDES |
| | | | | | | | | | MVTGESLPVDKTVGDTVIGSTINHSGTLVFRAEKV |
| | | | | | | | | | GSETVLAQIVDFVKKAQTSRAPIQDLTDKISGIFVP |
| | | | | | | | | | VVVILGIMTFWVWFVLLRDSVVVLGASFVSSLLYG |
| | | | | | | | | | VAVLIIACPCALGLATPTALMVGTGRSAKMGVLLK |
| | | | | | | | | | NGTVLQEIQKVQTLVFDKTGTLTEGKPVVTDVIGD |
| | | | | | | | | | EVEVFGLAASLEDASQHPLAEAIVKRASEAGLEFQ |
| | | | | | | | | | TVENFQTLHGKGVSGRINGKQVLLGNAKMLDGM |
| | | | | | | | | | DISNTYQDKLEELEKEAKTVVFLAVDNEIKGLLAL |
| | | | | | | | | | QDIPKENAKLAISQLKKRGLRTVMLTGDNAGVAR |
| | | | | | | | | | AIADQIGIEEVIAGVLPEEKAHEIHKLQQSGKVAFV |
| | | | | | | | | | GDGINDAPALSVADVGIAMGAGTDIAIESADLVLT |
| | | | | | | | | | TNNLLGVVRAFDMSKKTFHRILLNLFWAFIYNVVG |
| | | | | | | | | | IPIAAGVFSGVGLALNPELAGLAMAFSSVSVLTSSL |
| | | | | | | | | | LLNFSKID |
| 168 | peg.2083 | SP_0758 | 0.083 | 6 | CHO | | Yes | PTS System | MMKDTFKNVLSFEFWQKFGKALMVVIAVMPAAG |
| | | | | | transport | | | | LMISIGKSIVMINPTFTPLVITGGILEQIGWGVIGNLH |
| | | | | | | | | | ILFALAIGGSWAKERAGGAFAAGLAFILINRITGTIF |
| | | | | | | | | | GVSGDMLKNPDAMVTTFFGGSIKVADYFISVLEAP |
| | | | | | | | | | ALNMGVFVGIISGFVGATAYNKYYNFRKLPDALSF |
| | | | | | | | | | FNGKRFVPFVVILRSAIAAILLAAFWPVVQTGINNF |
| | | | | | | | | | GIWIANSQETAPILAPFLYGTLERLLLPFGLHHMLTI |
| | | | | | | | | | PMNYTALGGTYDILTGAAKGTQVFGQDPLWLAW |
| | | | | | | | | | VTDLVNLKGTDASQYQHLLDTVHPARFKVGQMIG |
| | | | | | | | | | SFGILMGVIVAIYRNVDADKKHKYKGMMIATALA |
| | | | | | | | | | TFLTGVTEPIEYMFMFIATPMYLVYSLVQGAAFAM |
| | | | | | | | | | ADVVNLRMHSFGSIEFLTRTPIAISAGIGMDIVNFV |
| | | | | | | | | | WVTVLFAVIMYFIANFMIQKFNYATPGRNGNYET |
| | | | | | | | | | AEGSEETSSEVKVAAGSQAVNIINLLGGRVNIVDV |
| | | | | | | | | | DACMTRLRVTVKDADKVGNAEQWKAEGAMGLV |
| | | | | | | | | | MKGQGVQAIYGPKADILKSDIQDILDSGEIIPETLPS |
| | | | | | | | | | QMTEAQQNTVHFKDLTEEVYSVADGQVVGLEQV |
| | | | | | | | | | KDPVFAQKMMGDGFAVEPANGNIVSPVSGTVSSIF |
| | | | | | | | | | PTKHAFGIVTEAGLEVLVHIGLDTVSLEGKPFTVHV |
| | | | | | | | | | AEGQKVAAGDLLVTADLDAIRAAGRETSTVVVFT |
| | | | | | | | | | NGDAIKSVKLEKTGSLAAKTAVAKVEL |
| 169 | peg.2115 | SP_0790 | 0.083 | 6 | transport | | | NA | MKKMKYYEETSALLHEFSEENQKYFEELWESFNL |
| | | | | | | | | | AGFLYDEDYLREQIYLMMLDFSEAERDGMSAEDY |
| | | | | | | | | | LGKNPKKIMKEILKGAPRSSIKESLLMPILVLAVLR |
| | | | | | | | | | YYQLLSDFSKGPLLTVNLLTFLGQLLIFLIGFGLVA |
| | | | | | | | | | TILRRSLVQDSPKMKIGTYIVVGTIVLLVVLGYVG |
| | | | | | | | | | MASFIQEGAFYIPAPWDSLSVFTISLVIGIWNWKEA |
| | | | | | | | | | VFRPFVSMIIAHLVVGSLLRYYEWMGISNVFLTKVI |
| | | | | | | | | | PSAVLFIGIFVLFRGFKKIKWSEV |
| 170 | peg.2138 | SP_0820 | 0.083 | 6 | Protein | | | ATP-dependent clp | MLCQNCKINDSTIHLYTNLNGKQKQIDLCQNCYKII |
| | | | | | processing | | | protease, ATP- | KTDPNNSLFKGMTDLNNRDFDPFGDFFNDLNNFRP |
| | | | | | | | | binding subunit | SSNTPPIPPTQSGGGYGGNGGYGSQNRGSAQTPPPS |
| | | | | | | | | | QEKGLLEEFGINVTEIARRGDIDPVIGRDDEIIRVIEI |
| | | | | | | | | | LNRRTKNNPVLIGEPGVGKTAVVEGLAQKIVDGD |
| | | | | | | | | | VPHKLQGKQVIRLDVVSLVQGTGIRGQFEERMQK |
| | | | | | | | | | LMEEIRKREDIILFIDEIHEIVGAGSASDGNMDAGNI |
| | | | | | | | | | LKPALARGELQLVGATTLNEYRIIEKDAALERRMQ |
| | | | | | | | | | PVKVDEPTVDETITILKGIQKKYEDYHHVQYTDAAI |
| | | | | | | | | | EAAATLSNRYIQDRFLPDKAIDLLDEAGSKMNLTL |
| | | | | | | | | | NFVDPKVIDQRLIEAENLKSQATREEDFEKAAYFR |
| | | | | | | | | | DQIAKYKEMQKKKITDQDTPIISEKTIEHIIEQKTNIP |
| | | | | | | | | | VGDLKEKEQSQLIHLAEDLKSHVIGQDDAVDKIAK |
| | | | | | | | | | AIRRNRVGLGTPNRPIGSFLFVGPTGVGKTELSKQL |
| | | | | | | | | | AIELFGSADSMIRFDMSEYMEKHSVAKLVGAPPGY |
| | | | | | | | | | VGYDEAGQLTEKVRHNPYSLILLDEVEKAHPDVM |
| | | | | | | | | | HMFLQVLDDGRLTDGQGRTVSFKDAIIIMTSNAGT |
| | | | | | | | | | GKTEASVGFGAAREGRTNSVLGELGNFFSPEFMNR |
| | | | | | | | | | FDGIIEFKALSKDNLLQIVELMLADVNKRLSSNNIR |
| | | | | | | | | | LDVTDKVKEKLVDLGYDPKMGARPLRRTIQDYIE |
| | | | | | | | | | DTITDYYLENPSEKDLKAVMTSKGNIQIKSAKKAE |
| | | | | | | | | | VKSSEKEK |
| 171 | peg.0038 | SP_0920 | 0.1 | 5 | metabolism | | | Catalyzes the | MKLEQVPTPAYVIDLAKLEANCRILQYVQEEAGCK |
| | | | | | | | | decarboxylation of | VLLAQKAYSLYKTYPLISQYLSGTTASGLYEAKLA |
| | | | | | | | | carboxynorspermidine | REEFPGEVHVFAPAFKDADLEELLEIMDHIVFNSER |
| | | | | | | | | and | QLRKHGPRCREAGVSVGLRLNPQCSTQGDHALYD |
| | | | | | | | | carboxy spermidine | PCAPGSRFGVTIDKIPSDLLDLVDGLHFHTLCEQGA |
| | | | | | | | | (By similarity) | DDLQTTLKAVEEQFGPYLHEVKWLNMGGGHHITR |
| | | | | | | | | | EGYDVDLLISEIKRIRKTYNLEIYIEPGEAIALNAGY |
| | | | | | | | | | LATEVLDIVENGMEILVLDASATCHMPDVLEMPYR |
| | | | | | | | | | PPLRNGFESQEKAHTYRLSSNTCLTGDVIGDYSFEN |
| | | | | | | | | | PVQIGDRLYFQDMAIYSFVKNNTFNGIGLPSLYLM |
| | | | | | | | | | DEQGDCSLLKAFGYQDFKGRLS |
| 172 | peg.0047 | SP_0930 | 0.1 | 5 | Cell wall | | | choline binding | MKKKLTSLALVGAFLGLSWYGNVQAQESSGNKIH |
| | | | | | processing | | | protein E | FINVQEGGSDAIILESNGHFAMVDTGEDYDFPDGS |
| | | | | | | | | | DSRYPWREGIETSYKHVLTDRVFRRLKELGVQKLD |
| | | | | | | | | | FILVTHTHSDHIGNVDELLSTYPVDRVYLKKYSDS |
| | | | | | | | | | RITNSERLWDNLYGYDKVLQTAAEKGVSVIQNITQ |
| | | | | | | | | | GDAHFQFGDMDIQLYNYENETDSSGELKKIWDDN |
| | | | | | | | | | SNSLISVVKVNGKKIYLGGDLDNVHGAEDKYGPLI |
| | | | | | | | | | GKVDLMKFNHHHDTNKSNTKDFIKNLSPSLIVQTS |
| | | | | | | | | | DSLPWKNGVDSEYVNWLKERGIERINAASKDYDA |
| | | | | | | | | | TVFDIRKDGFVNISTSYKPIPSFQAGWHKSAYGNW |
| | | | | | | | | | WYQAPDSTGEYAVGWNEIEGEWYYFNQTGILLQN |
| | | | | | | | | | QWKKWNNHWFYLTDSGASAKNWKKIAGIWYYF |
| | | | | | | | | | NKENQMEIGWIQDKEQWYYLDVDGSMKTGWLQY |
| | | | | | | | | | MGQWYYFAPSGEMKMGWVKDKETWYYMDSTG |
| | | | | | | | | | VMKTGEIEVAGQHYYLEDSGAMKQGWHKKAND |
| | | | | | | | | | WYFYKTDGSRAVGWIKDKDKWYFLKENGQLLVN |
| | | | | | | | | | GKTPEGYTVDSSGAWLVDVSIEKSATIKTTSHSEIK |
| | | | | | | | | | ESKEVVKKDLENKETSQHESVTNFSTSQDLTSSTSQ |
| | | | | | | | | | SSETSVNKSESEQ |
| 173 | peg.0250 | SP_1121 | 0.1 | 5 | CHO | | Yes | Catalyzes the | MDNREALKTFMTGENFYLQHYLGAHREELNGEY |
| | | | | | metabolism | | | formation of the | GYTFRVWAPNAQAVHLVGDFTNWIENQIPMVRND |
| | | | | | | | | alpha-1,6-glucosidic | FGVWEVFTNMAQEGHIYKYHVTRQNGHQLMKID |
| | | | | | | | | linkages in glycogen | PFAVRYEARPGTGAIVTELPDKKWRDGLWLARRK |
| | | | | | | | | by scission of a 1,4- | RWGFAERPVNIYEVHAGSWKRNPDGSPYSFAQLK |
| | | | | | | | | alpha-linked | DELIPYLVEMNYTHIEFMPLMSHPLGLSWGYQLM |
| | | | | | | | | oligosaccharide from | GYFALEHAYGRPEEFQDFVEECHTHNIGVIVDWVP |
| | | | | | | | | growing alpha-1,4- | GHFTINDDALAYYDGTPTFEYQDHNKAHNHGWG |
| | | | | | | | | glucan chains and | ALNFDLGKNEVQSFLISCIKHWIDVYHLDGIRVDA |
| | | | | | | | | the subsequent | VSNMLYLDYDDAPWTPNKDGGNLNYEGYYFLQR |
| | | | | | | | | attachment of the | LNEVIKLEYPDVMMIAEESSSATNITGMKEIGGLGF |
| | | | | | | | | oligosaccharide to | DYKWNMGWMNDILRFYEEDPIYRKYDFNLVTFSF |
| | | | | | | | | the alpha-1,6 | MYVFKENYLLPFSHDEVVHGKKSMMHKMWGDR |
| | | | | | | | | position | YNQFAGLRNLYTYQICHPGKKLLFMGSEYGQFLE |
| | | | | | | | | (By similarity) | WKSEEQLEWSNLEDPMNAKMKYFTSQLNQFYKD |
| | | | | | | | | | HRCLWEIDTSYDGIEIIDADNRDQSVLSFIRKGKKG |
| | | | | | | | | | EMLVCIFNMVPVERKDFTIGLPVAGIYEEVWNTEL |
| | | | | | | | | | EEWGGVWKEHNQTVQTQEGLWKDYEQTLTFTLP |
| | | | | | | | | | AMGASVWKIKRRLKSTKTVTNKNQKGVENEK |
| 174 | peg.0251 | SP_1122 | 0.1 | 5 | CHO | | | Catalyzes the | MKNEMLALILAGGQGTRLAKLTQSIAKPAVQFGG |
| | | | | | metabolism | | | synthesis of ADP- | RYRIIDFALSNCANSGIHNVGVVTQYQPLALNNHIG |
| | | | | | | | | glucose, a sugar | NGSSWGLDGIDSGVSILQPYSASEGNRWFEGTSHAI |
| | | | | | | | | donor used in | YQNIDYIDSVNPEYVLILSGDHIYKMDYDDMLQSH |
| | | | | | | | | elongation reactions | KDNNASLTVAVLDVPLKEASRFGIMNTDANNRIVE |
| | | | | | | | | on alpha-glucans (By | FEEKPAQPKSTKASMGIYIFDWQRLRNMLVAAEKS |
| | | | | | | | | similarity) | KVGMSDFGKNVIPNYLELGESVYAYEFSGYWKDV |
| | | | | | | | | | GTIESLWEANMEYISPENALDSRNRQWKIYSRNLIS |
| | | | | | | | | | PPNFLGANAHVEDSLVVDGCFVDGTVKHSILSTGA |
| | | | | | | | | | QVREGAEVLDSVIMSGAIIGQGAKIKRAIIGEGAIIS |
| | | | | | | | | | DGVEIDGTDEVQVVGYNEVVGVATDED |
| 175 | peg.0422 | n/a | 0.1 | 5 | CHO | | | Conserved Protein | MELVEFKNGHVNTVHEHIAITKVKEFLNNHDIPKD |
| | | | | | metabolism | | | | KGGIHKISTDFFYNIIDMETTTEENRPWESHKEYYD |
| | | | | | | | | | VHYLLNGEEIILYNFLSQMELSEYKVDDDWQQMN |
| | | | | | | | | | GTALFSIKLKKDMLLLLEPNDAHKTGLLVEEPINIK |
| | | | | | | | | | KVVFKVKI |
| 176 | peg.0438 | SP_1343 | 0.1 | 5 | transport | | | ABC transporter | MKDVVYSITPENKLSIDFSFKSPFRVLLTGTSGSGK |
| | | | | | | | | | TTILNLINGSLKPQKGYVNLLSHGKKSSDSIPTVDQ |
| | | | | | | | | | TPYIFDTTIRENVTLFQNEYFSDDQIIEVLKKVNLYE |
| | | | | | | | | | ELEKIDILNYQCGENGSNLSGGQKQKIALARALIRN |
| | | | | | | | | | NKVYLFDEISANLDNDNSNSIHDILFNLGISFIEVSH |
| | | | | | | | | | HYDLNDKRYTDI |
| 177 | peg.0440 | SP_1346 | 0.1 | 5 | bacteriocin | | | NA | MKRIIPVYIFQQVNVLLVSLYLLKFLCIGELTILQIL |
| | | | | | | | | | YGSSLISFLWMYGQRKQAHKVNMKSRMKWLGVE |
| | | | | | | | | | FVSLLIISLCFSLIHAQGSTNQANLIGLQHQIPWFSFL |
| | | | | | | | | | LFLINASMVEEFLYREILWNLVRNLDIRVALTSVLF |
| | | | | | | | | | ALAHHTGTILAWCLYVSLGMFLGMVRYKSDLWG |
| | | | | | | | | | SMGLHLVWNLLVYSLLLF |
| 178 | peg.0530 | SP_1450 | 0.1 | 5 | adhesin | | Yes | lipolytic protein | VAVQLLENWLLKEQEKIQTKYRHLNHISVVEPNIL |
| | | | | | | | | G-D-S-L family | FIGDSIVEYYPLQELFGTSKTIVNRGIRGYQTGLLLE |
| | | | | | | | | | NLDAHLYGGAVDKIFLLIGTNDIGKDVPVNEALNN |
| | | | | | | | | | LEAIIQSVARDYPLTEIKLLSILPVNEGEKYQQAVYI |
| | | | | | | | | | RSNEKIQNWNQAYQELASAYMQVEFVPVFNCLTD |
| | | | | | | | | | QAGQLKKEYTTDGLHLSIAGYQALSKSLKDYLY |
| 179 | peg.0635 | SP_1548 | 0.1 | 5 | unknown | | Yes | NA | MKRIVFELIFIATTWYIFLPPLNLTSWEFLFFLCGHL |
| | | | | | | | | | LVVAILFGFGKGINLVKTVHVRHGKAEAALNLEGF |
| | | | | | | | | | KINRLGKILLASIGGILLLAALVSLVTSSMFQAKNY |
| | | | | | | | | | ANVVTVTEKDFTEFPRSDTSKVPILDRSTAEKIGDR |
| | | | | | | | | | YLGSLTDKVSQYVAADTYTQLTIDGKPYRVTPLEY |
| | | | | | | | | | ADPIKWFNNQAKGIGEYIKVDMVTGNADLVDLKT |
| | | | | | | | | | PIKYSDSEYFNRDVKRHLRLKYPTKIFKTPSFEVDD |
| | | | | | | | | | EGNPFYVATVYQKQFGLAVPRPASVIILDATNGET |
| | | | | | | | | | KEYSLSDVPEWVDRIYPAEETIEQINYNGKYKDGF |
| | | | | | | | | | LNAMISKKNVTQTTKGYNYLSIGNDIYLYTGVTSA |
| | | | | | | | | | NADESNLGFILENMRTGEITKYSLASATEESARESA |
| | | | | | | | | | EGAVQEKSYKATFPILINLNDKPLYIMGLKDNAGL |
| | | | | | | | | | VKEYALVDAVEYQNVIVATTVEEMLSKYANKNDL |
| | | | | | | | | | EIDNATTESINGVVADLKSAVIKGDTVYFFKVDGKI |
| | | | | | | | | | YKVKASVSDDLPYLENGKTFEGQVGKDNYLKTFK |
| | | | | | | | | | LR |
| 180 | peg.0658 | SP_1573 | 0.1 | 5 | Cell wall | LytC | Yes | Putative cell wall | LKTKIGLASICLLGLATSHVAANETEVAKTSQDTTT |
| | | | | | processing | | | binding repeat | ASSSSEQNQSSNKTQTSAEVQTNAAAHWDGDYYV |
| | | | | | | | | | KDDGSKAQSEWIFDNYYKAWFYINSDGRYSQNEW |
| | | | | | | | | | HGNYYLKSGGYMAQNEWIYDSNYKSWFYLKSDG |
| | | | | | | | | | AYAHQEWQLIGNKWYYFKKWGYMAKSQWQGSY |
| | | | | | | | | | FLNGQGAMMQNEWLYDPAYSAYFYLKSDGTYAN |
| | | | | | | | | | QEWQKVGGKWYYFKKWGYMARNEWQGNYYLT |
| | | | | | | | | | GSGAMATDEVIMDGTRYIFAASGELKEKKDLNVG |
| | | | | | | | | | WVHRDGKRYFFNNREEQVGTEHAKKVIDISEHNG |
| | | | | | | | | | RINDWKKVIDENEVDGVIVRLGYSGKEDKELAHNI |
| | | | | | | | | | KELNRLGIPYGVYLYTYAENETDAESDAKQTIELIK |
| | | | | | | | | | KYNMNLSYPIYYDVENWEYVNKSKRAPSDTGTW |
| | | | | | | | | | VKIINKYMDTMKQAGYQNVYVYSYRSLLQTRLKH |
| | | | | | | | | | PDILKHVNWVAAYTNALEWENPHYSGKKGWQYT |
| | | | | | | | | | SSEYMKGIQGRVDVSVWY |
| 181 | peg.0697 | n/a | 0.1 | 5 | transport | | | Major Facilitator | MHIFLKNRAFRQLTVNEWISSFGDTIFYLAFINYVS |
| | | | | | | | | | SYAFAPLAIFLISLSETIPQVLQLFTGVIADFQKNRIS |
| | | | | | | | | | KYISILFIKVLLYSGVTLLLTSTDFSLFSVFFICSMNL |
| | | | | | | | | | ISDTIGFLAGYMLTPIYIRLINDDMTEAMGFRQSTSS |
| | | | | | | | | | IVRLIGNLSGGVFLGLFSISTLAFVNVLTFLFAFLGS |
| | | | | | | | | | LLIRNRLKKEEEKIEVPPYVGMSSFFQHLKESMKLL |
| | | | | | | | | | MTMEDVMVLLWILSISQAVLMMVEPVSAILLIHHP |
| | | | | | | | | | FMGLSTGQSLAILIMISLLHVILGGLLSGFLSKKISIR |
| | | | | | | | | | LNIYWSLLMESLIVIDFLRGSFLLILLGSAGDAFSAG |
| | | | | | | | | | VLSPRLQAMIFGIIPEELMGSVQSSINVINLLIPAVLS |
| | | | | | | | | | LALVFLATSAGLEVVAFALIILLLIAAYLVHQMKNL |
| | | | | | | | | | PNQEEV |
| 182 | peg.0820 | SP_1743 | 0.1 | 5 | regulation | | Yes | Methyltransferase | MATYETFAAVYDAVMDDSLYDKWTNFSLRHLPK |
| | | | | | | | | Type | TKERKKLLELACGTGIQSVRFSQAGFDVTGLDLSA |
| | | | | | | | | | DMLKIAEKRATSAKQKIAFIEGNMLNLSKAGKYDF |
| | | | | | | | | | VTCYSDSICYMQDEVEVGDVFKDVYNALNEEGVF |
| | | | | | | | | | IFDVHSTYQTDEVFPGYSYHENAEDFAMLWDTYE |
| | | | | | | | | | DEAPHSIVHELTFFIKEADGSFSRHDEVHEERTYEIL |
| | | | | | | | | | TYDILLEQAGFKSFKLYADFEDKEPTETSTRWFFV |
| | | | | | | | | | AQK |
| 183 | peg.0888 | SP_1821 | 0.1 | 5 | regulation | | Yes | Transcriptional | MKNINGKKVTIYDIARLSGFSPKTVSRVINGGVNV |
| | | | | | | | | regulator | KEETYQAIQKVIEELSYIPNAYAKNLTKKEAINILIS |
| | | | | | | | | | VKKIDSFPLIWFHTLLDKVLRTCKEFGVNAIVEYFG |
| | | | | | | | | | EEDTISNSIISSTGSLVDGVIVFYESVDDIRIQYLKKN |
| | | | | | | | | | HMPFLVFGESQTSGVVYVSNNNFQATYDMMKAV |
| | | | | | | | | | TEEKFKNMWLLMGGESHVNKDRERGVRSFLNDK |
| | | | | | | | | | NYFMDLKVIYGLSTIDSVYSYAMQHLTTQNYPDIIF |
| | | | | | | | | | VSGDEKVQGLIRACYEKGILIPDDISIIGFDNIPISQY |
| | | | | | | | | | YTPALSTIAPNYVKLAKEMIEGVLAIIKGESVTSVE |
| | | | | | | | | | VSPKFVRRQSF |
| 184 | peg.0927 | SP_1861 | 0.1 | 5 | Amino acid | | | ABC transporter | MIEYKNVALRYTEKDVLRDVNLQIEDGEFMVLVG |
| | | | | | transport | | | | PSGSGKTTMLKMINRLLEPTDGNIYMDGKRIKDYD |
| | | | | | | | | | ERELRLSTGYVLQAIALFPNLTVAENIALIPEMKGW |
| | | | | | | | | | SKEEITKKTEELLAKVGLPVAEYGHRLPSELSGGEQ |
| | | | | | | | | | QRVGIVRAMIGQPKIFLMDEPFSALDAISRKQLQVL |
| | | | | | | | | | TKELHKEFGMTTIFVTHDTDEALKLADRIAVLQDG |
| | | | | | | | | | EIRQVANPETILKAPATDFVADLFGGSVHD |
| 185 | peg.0934 | SP_1869 | 0.1 | 5 | Metal | | | permease protein | MKLSHYLIGLLLLLVFLSISIGTSDFSWGKLFDFDQ |
| | | | | | transport | | | | QTWLLFQESRLPRTISILLTASSMSMAGLLMQTITQ |
| | | | | | | | | | NQFAAPSTVGTTEAAKLGMVLSLFVFPSASLTQKM |
| | | | | | | | | | LFAFVSSIVFTLFFLAFMTIFTVKERWMLPLIGIIYSG |
| | | | | | | | | | IIGSVTEVIAYRFNLVQSMTAWTQGSFSMIQTHQYE |
| | | | | | | | | | WLFLGLIILITVWKLSQTFTIMNLGKETSESLGISYS |
| | | | | | | | | | LLEKLALFLVALTTSVTMITVGGLPFLGVIVPNLVR |
| | | | | | | | | | KRYGDNLSQTKLMVALVGANLVLACDILSRVLIRP |
| | | | | | | | | | YELSVSLLLGIIGSLVFILLLWRGGRKDAD |
| 186 | peg.1014 | SP_1925 | 0.1 | 5 | unknown | | | NA | MYICIDNSMTKNKELVKNQTFKPALLTRRLVKNF |
| | | | | | | | | | MIEEPDLARNPFTRPTLIDLDKVFMLDNTVIPTSYL |
| | | | | | | | | | ARRRRNVSEELYEEILDYLVQPRLISLNKSEFMQLN |
| | | | | | | | | | PGTY |
| 187 | peg.1055 | SP_1967 | 0.1 | 5 | signaling | | Yes | domain protein | MKKKIRWPLYVIAALIVTFLAFVVPLPYYIEVPGGS |
| | | | | | | | | | EDIRQVLKVNDTEDKEAGAYQFVTVGVQHATLAH |
| | | | | | | | | | MIYAWLTPFTDIRSAQETTGGSSDVEFMRINQFYM |
| | | | | | | | | | QTSQNMAKYQGLKTAGKDIELKYFGVYVLNVTD |
| | | | | | | | | | NSTFKGILNISDTVTAVNDQTFDSSKDLIDYVSSQK |
| | | | | | | | | | LGDSVKVTYEEDGQTKSAEGKIITLENGKNGIGIGL |
| | | | | | | | | | IDRTEVISNVPISFSTAGIGGPSAGLMFSLAIYTQIAH |
| | | | | | | | | | PDLRNGRIVAGTGTIDRDGNVGDIGGIDKKVVASA |
| | | | | | | | | | RAGAAIFFAPDNPVSEEEQKAHPDAKNNYQTALEA |
| | | | | | | | | | AKTIKTDMKIVPVKTLQDAIDYLKNNP |
| 188 | peg.1060 | SP_1972 | 0.1 | 5 | unknown | | Yes | Membrane | MNHTIIHDRAGLNQFYAKVYAFVGLGIGLSALVSG |
| | | | | | | | | | LMLTVFQSQLVYFLMQGRLWLTIATFAELALVFV |
| | | | | | | | | | ASSMASRNSPSALPVFLLYSVLNGFTLSFVVAFYTP |
| | | | | | | | | | GTVLSAFVSSALLFFVMAAVGIFTKKDLSGIGRAM |
| | | | | | | | | | MAALIGLLIAMVVNIFLASGFFDYMISVAMVLVFS |
| | | | | | | | | | GLIAWDNQKIRLAYEQSQGRVATGWVVSMALSIY |
| | | | | | | | | | LDFINLFLSILRIFGRND |
| 189 | peg.1195 | SP_2109 | 0.1 | 5 | transport | | | binding-protein- | MEKQQPSKAALLSIIPGLGQIYNKQKAKGFIFLGVT |
| | | | | | | | | dependent transport | IVFVLYFLALATPELSNLITLGDKPGRDNSLFMLIR |
| | | | | | | | | systems inner | GAFHLIFVIVYVLFYFSNIKDAHTIAKRINNGIPVPR |
| | | | | | | | | membrane | TLKDMIKGIYENGFPYLLIIPSYVAMTFAIIFPVIVTL |
| | | | | | | | | Component | MIAFTNYDFQHLPPNKLLDWVGLTNFTNIWSLSTF |
| | | | | | | | | | RSAFGSVLSWTIIWALAASTLQIVIGIFTAIIANQPFI |
| | | | | | | | | | KGKRIFGVIFLLPWAVPAFITILTFSNMFNDSVGAIN |
| | | | | | | | | | TQVLPILAKFLPFLDGALIPWKTDPTWTKIALIMMQ |
| | | | | | | | | | GWLGFPYIYVLTLGILQSIPNDLYEAAYIDGANAW |
| | | | | | | | | | QKFRNITFPMILAVAAPTLISQYTFNFNNFSIMYLFN |
| | | | | | | | | | GGGPGSVGGGAGSTDILISWIYRLTTGTSPQYSMA |
| | | | | | | | | | AAVTLIISIIVISISMIAFKKLHAFDMEDV |
| 190 | peg.1450 | n/a | 0.1 | 5 | CHO | | | Inherit from NOG: | MRYDFGKVYKEIRESKGLTQEEVCGGVLSRTSLSK |
| | | | | | metabolism | | | Transcriptional | IESGKTTPKYENMEFLLRQINMSFEEFEYICQLYQP |
| | | | | | | | | regulator | SQRTEIMQTYLNMRSIIGTSDLVNLFQKCQDYLKT |
| | | | | | | | | | HHDLPIEEIRDMLEVVIYIRQHGAGELSDHAEQVV |
| | | | | | | | | | KKLWRKIEKQDTWYESDLKILNTILFSFPIEYLHLIT |
| | | | | | | | | | GKILQRLEVYKNYQHLYDLRIAILLNLSTLYLYNQ |
| | | | | | | | | | DKNMCKQICYTLLEDAKNKKSYDRLAICYVRIGIC |
| | | | | | | | | | TDDSKLIQKGFSLLELTEETSMLSHLKKEVEIYYQA |
| | | | | | | | | | KER |
| 191 | peg.1459 | n/a | 0.1 | 5 | unknown | | | NA | MELVLPNNYVVIDEEEMMYLDGGAYLSKSACQGI |
| | | | | | | | | | CVALAMSPGTFIALTGAAVLTKKLINYIKVGGLGG |
| | | | | | | | | | WLIGAAAGVLATAAGKIAYCIGYGALNRGCDISGN |
| | | | | | | | | | PYPWDGFISATVR |
| 192 | peg.1493 | SP_0152 | 0.1 | 5 | transport | | Yes | ABC transporter, | MESLIQTYLPNVYKMGWAGQAGWGTAIYLTLYM |
| | | | | | | | | permease | TVLSFIIGGFLGLVAGLFLVLTAPGGVLENKVVFWI |
| | | | | | | | | | LDKITSIFRAVPFIILLAILSPLSHLIVKTSIGPNAAL |
| | | | | | | | | | VPLSFAVFAFFARQVQVVLAELDGGVIEAAQASGAT |
| | | | | | | | | | FWDIVGVYLSEGLPDLIRVTTVTLISLVGETAMAG |
| | | | | | | | | | AVGAGGIGNVAIAYGFNRYNHDVTILATIIIILIIFAI |
| | | | | | | | | | QFLGDFLTKKLSHK |
| 193 | peg.1494 | SP_0153 | 0.1 | 5 | unknown | | | integral membrane | MKKSILTTLLFAVLYFLCMGIGVLLGNLFDQTGNM |
| | | | | | | | | protein TIGR02185 | FYAPAFTALVGGSVYMILVAKVPRFGAITTIGLVIA |
| | | | | | | | | | FFFLGTKHGAGSFLPGIICGLLADEVAHLGKYKDK |
| | | | | | | | | | TKNFLSFIIFAFSTTGPILLMWIAPKAYMATLLARG |
| | | | | | | | | | KSQEYIDRIMVAPNPGTVLLFIASIVIGALVGALIGQ |
| | | | | | | | | | ALSKKFAQKI |
| 194 | peg.1509 | SP_0167 | 0.1 | 5 | transport | | Yes | Major Facilitator | MKNLIKLLIIRLIVNLADSVFYIVALWHVSNNYSSS |
| | | | | | | | | | MFLGIFIAVNYLPDLLLIFFGPVIDRVNPQKILIISIL |
| | | | | | | | | | VQLAVAVIFLLLLNQISFWVIMSLVFISVMASSISYVI |
| | | | | | | | | | EDVLIPQVVEYDKIVFANSLFSISYKVLDSIFNSFAS |
| | | | | | | | | | FLQVAVGFILLVKIDIGIFLLALFILLLLKFRTSNANI |
| | | | | | | | | | ENFSFKYYKREVLQGTKFILNNKLLFKTSISLTLINF |
| | | | | | | | | | FYSFQTVVVPIFSIRYFDGPIFYGIFLTIAGLGGILGN |
| | | | | | | | | | MLAPIVIKYLKSNQIVGVFLFLNGSSWLVAIVIKDY |
| | | | | | | | | | TLSLILFFVCFMSKGVFNIIFNSLYQQIPPHQLLGRV |
| | | | | | | | | | NTTIDSIISFGMPIGSLVAGTLIDLNIELVLIAISIPY |
| | | | | | | | | | FLFSYIFYTDNGLKEFSIY |
| 195 | peg.1535 | SP_0200 | 0.1 | 5 | unknown | | Yes | NA | MSVYGRVEEVHKENREPLEYQIEQESHHRESSRLP |
| | | | | | | | | | LVKILLWSTLVTGITLGVPLLLDLMSAQEVQDFYA |
| | | | | | | | | | GWALHQTGKIYSDYYGSQGLLYYLLTYVSQGGFF |
| | | | | | | | | | FAIFEWLALVAGGFFLFRSADTLTEQGDQAGHLVT |
| | | | | | | | | | IFYMLVTGLAFGGGYATLLALPFLFAAFSLVAAYL |
| | | | | | | | | | SNPSHDKGFVRIGLALAGGFFFAPLSSLLFIAVVSL |
| | | | | | | | | | GLLVFNLGHRRFAHGFYQFLAVALGFSLVFYPTAY |
| | | | | | | | | | YSAATGSFGDAISGIRYPIDSIRFDFTSKILENMFFY |
| | | | | | | | | | GLLSLGLGFVVCIFLGLFQSKPFKLYVISVPASLVVI |
| | | | | | | | | | LGLILLFFSQEPLHASYLMVVFPVFLLLLVTNIKSQ |
| | | | | | | | | | QRGRSARRSLRETPVSLWSRFFKGNLYLLVFGFVY |
| | | | | | | | | | LLSVPFLMKFVLYPVPYQERNRLADLVKEETNTED |
| | | | | | | | | | AIYAWDDTATLYRKSERLSPSAILSPLHYTATEENR |
| | | | | | | | | | NKLLNDLKEKQPKVIVVNDKVVVWSEVETLLKEN |
| | | | | | | | | | YQQVKTDYSEFKVYKIK |
| 196 | peg.1636 | n/a | 0.1 | 5 | transport | | | pts system | MSKYNVLAKDIVTYVGGAENVKSLRHCATRLRFE |
| | | | | | | | | | LKDESQADKEALMNLDILQVVQASGQYQVVVGPH |
| | | | | | | | | | VASVYEAVMAELPVIGGASSINEDTTAEEKKWYD |
| | | | | | | | | | VIFDTISGSFTPLIPVFCGSGLVKALGSVLLMTGLLT |
| | | | | | | | | | AESSTYAVLNAAGNAVFYFLPILLAISVANKLGTNP |
| | | | | | | | | | YIAGAIGAALLEPSFTALAGNESNTFLGLPIIINNYA |
| | | | | | | | | | SSVFPAFMAVVGLYFLDKFLKKVVPATIHLVVLPFI |
| | | | | | | | | | EIVAMVPLTIFIFGPFGTYLSTGLSMFVTNLLDLNA |
| | | | | | | | | | MLAGAVLSMIWIYVVMLGLHWALIPIMINNIATNG |
| | | | | | | | | | SDPLMGLMIGTVWVAGGVSLGVALKAKDKKLKGI |
| | | | | | | | | | AWTGMIPCFLSGVSEPIMYGILFRYKKSLMWATV |
| | | | | | | | | | MNAVTGAMAGLIGISGTQIAGGVFTIPTFSPILGYL |
| | | | | | | | | | ALIAVSVFGTAALIVIFGFGEEGSKA |
| 197 | peg.1660 | SP_0311 | 0.1 | 5 | unknown | | | NA | MSLDIDKEKMTIMGIAFENRSVFKSVWYALSTNMI |
| | | | | | | | | | EGWRPTVSDVEKLRDEALSLGMT |
| 198 | peg.1670 | SP_0322 | 0.1 | 5 | bacteriocin | | Yes | Glycosyl Hydrolase | MIKKVTIEKIKSPERFLEVPLLTKEEVGQAIDKVIRQ |
| | | | | | | | | Family 88 | LELNLDYFKEDFPTPATFDNVYPIMDNTEWTNGF |
| | | | | | | | | | WTGELWLAYEYSQQDAFKNIAHKNVLSFLDRVNK |
| | | | | | | | | | RVELDHHDLGFLYTPSCMAEYKINGDGEAREATL |
| | | | | | | | | | KAADKLIERYQEKGGFIQAWGDLGKKEHYRLIIDC |
| | | | | | | | | | LLNIQLLFFAYQETGDQKYYDIAESHFYASANNVIR |
| | | | | | | | | | DDASSFHTFYFDPETGQPFKGVTRQGYSDDSCWA |
| | | | | | | | | | RGQSWGVYGIPLTYRHLKDESCFDLFKGVTNYFLN |
| | | | | | | | | | RLPKDHVSYWDLIFNDGSAQSRDSSATAIAVCGIH |
| | | | | | | | | | EMLKHLPEVDADKDIYKHAMHAMLRSLIEHYAND |
| | | | | | | | | | QFTPGGTSLLHGVYSWHSGKGVDEGNIWGDYYYL |
| | | | | | | | | | EALIRFYKDWNLYW |
| 199 | peg.1677 | SP_2241 | 0.1 | 5 | unknown | | | NA | MKSLARLLIIHVFISIFLFFALISGAVSHTVLLLLLLF |
| | | | | | | | | | LPALNKGLEKIQSKRIPVLNAALFFLLISFPQLLTNP |
| | | | | | | | | | VQWKFSIFLVVTIISSLAYFYNFYQVVKEVDQKQLI |
| 200 | peg.1875 | SP_0536 | 0.1 | 5 | unknown | | | NA | MRIKEFEDDDLVSPRTNQLMFIGLTGFMSIICLYRGI |
| | | (weak) | | | | | | | TAGESYQQLIAYIGAILCLIIMLLLIWGLKYYKK |
| 201 | peg.1877 | SP_0545 | 0.1 | 5 | bacteriocin | | Yes | caax amino terminal | MKKYQLLFKISAVFSYLFFVFGLSQLTLIVQNYWQ |
| | | | | | | | | protease family | FSSQIGNLFWIQNILSLLFIGVMIVVLVKTGHGYLFR |
| | | | | | | | | protein | IPRKKWLWYSILTVLVVVFQISFNVQTAKHVQSTA |
| | | | | | | | | | EGWAVLIGYSGTNFAELGIYIALFFLVPLMEELIYR |
| | | | | | | | | | GLLQHAFFKHSRFGLDLLLPSILFALPHFLSLPSLLD |
| | | | | | | | | | IFVFATVGIIFAGLTRYTKSIYPSYAVHVINNIVATFP |
| | | | | | | | | | FLLTFLHRVLG |
| 202 | peg.1928 | SP_0599 | 0.1 | 5 | transport | | | ABC transporter, | MNPIQRSWAYVSRKRLRSFILFLILLVLLAGISACLT |
| | | | | | | | | permease | LMKSNKTVESNLYKSLNTSFSIKKIENGQTFKLSDL |
| | | | | | | | | | ASVSKIKGLENVSPELETVAKLKDKEAVTGEQSVE |
| | | | | | | | | | RDDLSAADNNLVSLTALEDSSKDVTFTSSAFNLKE |
| | | | | | | | | | GRHLQKGDSKKILIHEELAKKNGLSLHDKIGLDAG |
| | | | | | | | | | QSESGKGQTVEFEIIGIFSGKKQEKFTGLSSDFSENQ |
| | | | | | | | | | VFTDYESSQTLLGNSEAQVSAARFYVENPKEMDG |
| | | | | | | | | | LMKQVENLALENQGYQVEKENKAFEQIKDSVATF |
| | | | | | | | | | QTFLTIFLYGMLIAGAGALILVLSLWLRERVYEVGI |
| | | | | | | | | | LLALGKGKSSIFLQFCLEVVLVSLGALLPAFVAGN |
| | | | | | | | | | GITTYLLQTLLASGDQASLQDTLAKASSLSTSILSFA |
| | | | | | | | | | ESYVFLVLLSCLSVALCFLFLFRKSPKEILSSIS |
| 203 | peg.2015 | SP_0687 | 0.1 | 5 | Peptide | | | abc transporter atp- | MIELKNISKKFGSRQLFSDTNLHFEGGKIYALIGTS |
| | | | | | transport | | | binding protein | GCGKTTLLNMIGRLEPYDKGQIIYDGTSLKDIKPSV |
| | | | | | | | | | FFRDYLGYLFQDFGLIESQTVKENLNLGLVGKKLK |
| | | | | | | | | | EKEKISLMKQALNRVNLSYLDLKQPIFELSGGEAQ |
| | | | | | | | | | RVALAKIILKDPPLILADEPTASLDPKNSEELLSILES |
| | | | | | | | | | LKNPNRTIIIATHNPLIWEQVDQVIRVTDLSHR |
| 204 | peg.2041 | SP_0719 | 0.1 | 5 | Metal | | | TENA THI-4 family | METQDYAFQPGLTVGELLKSSQKDWQAAINHRFV |
| | | | | | transport | | | protein | KELFAGTIENKVLKDYLIQDYHFFDAFLSMLGACV |
| | | | | | | | | | AHADKLESKLRFAKQLGFLEADEDGYFQKAFKEL |
| | | | | | | | | | KVAENDYLEVTLHPVTKAFQDLMYSAVASSDYAH |
| | | | | | | | | | LLVMLVIAEGLYLDWGSKDLALPEVYIHSEWINLH |
| | | | | | | | | | RGPFFAEWVQFLVDELNRVGKNREDLTELQQRWN |
| | | | | | | | | | QAVALELAFFDIGYNV |
| 205 | peg.2157 | SP_0840 | 0.1 | 5 | unknown | | | NA | MKILKRYILELCFILSFALPFIKGANADNGRCFVET |
| | | (weak) | | | | | | | YYGFTFLMEHAIVTAVFIYSFLIAFLLKKRWAKWI |
| | | | | | | | | | AAGSYCFLVLWIATEGYFFRMSLEDLIRLWTSLEIL |
| | | | | | | | | | TQTYQLGFYLNILLGILLIIKYFKVKQ |

*in van Opijnen and Camilli (2012) Genome Res. 22(12):2541-2551
**Protein functions were predicted with the eggNOG pipeline, using HMMR on the bacteria database.
https://academic.oup.com/mbe/article/34/8/2115/3782716

### 3. Vaccine Compositions

[0019] Vaccine compositions are provided that comprise at least one immunogenic polypeptide comprising at least one S. pneumoniae protein that is required for or involved in mammalian transmission of S. pneumoniae. In some embodiments, the S. pneumoniae protein required for or involved in mammalian transmission of S. pneumoniae has an amino acid sequence set forth as any one of SEQ ID NOs: 1, 2, 3, 4, 5, 6, 7, 8, 9, 10, 11, 12, 13, 14, 15, 16, 17, 18, 19, 20, 21, 22, 23, 24, 25, 26, 27, 28, 29, 30, 31, 32, 33, 34, 35, 36, 37, 38, 39, 40, 41, 42, 43, 44, 45, 46, 47, 48, 49, 50, 51, 52, 53, 54, 55, 56, 57, 58, 59, 60, 61, 62, 63, 64, 65, 66, 67, 68, 69, 70, 71, 72, 73, 74, 75, 76, 77, 78, 79, 80, 81, 82, 83, 84, 85, 86, 87, 88, 89, 90, 91, 92, 93, 94, 95, 96, 97, 98, 99, 100, 101, 102, 103, 104, 105, 106, 107, 108, 109, 110, 111, 112, 113, 114, 115, 116, 117, 118, 119, 120, 121, 122, 123, 124, 125, 126, 127, 128, 129, 130, 131, 132, 133, 134, 135, 136, 137, 138, 139, 140, 141, 142, 143, 144, 145, 146, 147, 148, 149, 150, 151, 152, 153, 154, 155, 156, 157, 158, 159, 160, 161, 162, 163, 164, 165, 166, 167, 168, 169, 170, 171, 172, 173, 174, 175, 176, 177, 178, 179, 180, 181, 182, 183, 184, 185, 186, 187, 188, 189, 190, 191, 192, 193, 194, 195, 196, 197, 198, 199, 200, 201, 202, 203, 204, and 205, or an immunogenic fragment or variant of any thereof, and a non-naturally occurring pharmaceutically acceptable carrier.

[0020] In certain embodiments, the vaccine composition comprises an immunogenic polypeptide comprising a S. pneumoniae protein (or an immunogenic fragment or variant thereof) that is required for or involved in mammalian transmission of S. pneumoniae and is naturally expressed on the surface of at least one strain of S. pneumoniae. Alternatively, the S. pneumoniae protein is naturally expressed on the surface of at least one strain of S. pneumoniae when the bacterium is undergoing autolysis. In particular embodiments, the vaccine composition comprises an immunogenic polypeptide comprising a S. pneumoniae protein (or an immunogenic fragment or variant thereof) that is required for or involved in mammalian transmission of S. pneumoniae, wherein the immunogenic polypeptide does not comprise a transmembrane domain.

[0021] In certain embodiments, the vaccine composition comprises an immunogenic polypeptide comprising a S. pneumoniae choline-binding protein or an immunogenic fragment or variant thereof. In some of these embodiments, the choline-binding protein has an amino acid sequence selected from the group consisting of SEQ ID NO: 27, 39, and 82; or an immunogenic fragment or variant of any thereof.

[0022] In other embodiments, the vaccine composition comprises an immunogenic polypeptide comprising a S. pneumoniae sensor kinase of the competence cascade (ComD), the homolog of putative C3-degrading protease (CppA), or the iron transporter PiaA, or an antigenic fragment or variant of any thereof. In some of these embodiments, the ComD protein has the amino acid sequence set forth as SEQ ID NO: 92 or an immunogenic fragment or variant thereof. In other embodiments, the CppA protein has the amino acid sequence set forth as SEQ ID NO: 44 or an immunogenic fragment or variant thereof. In still other embodiments, the PiaA protein has the amino acid sequence set forth as SEQ ID NO: 10 or an immunogenic fragment or variant thereof.

[0023] A “vaccine composition” is a formulation containing at least one immunogenic polypeptide comprising at least one S. pneumoniae protein that is required for or involved in mammalian transmission of S. pneumoniae in a form suitable for administration to a subject that results in a reduction in the transmissibility of S. pneumoniae upon infection.

[0024] As used herein, the terms “peptide,” “polypeptide,” or “protein” are used interchangeably herein and are intended to encompass a singular “polypeptide” as well as plural “polypeptides,” and refers to a molecule composed of monomers (amino acids) linearly linked by amide bonds (also known as peptide bonds). The terms “peptide” and “polypeptide” refer to any chain or chains of two or more amino acids, and does not refer to a specific length of the product. Thus, peptides, dipeptides, tripeptides, oligopeptides, “protein,” “amino acid chain,” or any other term used to refer to a chain or chains of two or more amino acids, are included within the definition of “peptide” and “polypeptide”. The terms apply to amino acid polymers in which one or more amino acid residues is an artificial chemical analogue of a corresponding naturally occurring amino acid, as well as to naturally occurring amino acid polymers. Non-limiting examples of artificial amino acid residues include norleucine and selenomethionine. An amino acid residue is a molecule having a carboxyl group, an amino group, and a side chain and having the generic formula H₂NCHRCOOH, where R is an organic substituent, forming the side chain. An amino acid residue, whether it is artificial or naturally occurring, is capable of forming a peptide bond with a naturally occurring amino acid residue.

[0025] The immunogenic polypeptides used in the presently disclosed compositions and methods can be recombinantly produced, chemically synthesized, or purified from a biological sample. In some embodiments, the immunogenic polypeptide is an isolated polypeptide.

[0026] An “isolated” or “purified” peptide is substantially or essentially free from components that normally accompany or interact with the peptide as found in its naturally occurring environment. Thus, an isolated or purified peptide is substantially free of other cellular material, or culture medium when produced by recombinant techniques, or substantially free of chemical precursors or other chemicals when chemically synthesized. A peptide that is substantially free of cellular material includes preparations of peptide having less than about 30%, 20%, 10%, 5%, or 1% (by dry weight) of contaminating protein. When the peptide is recombinantly produced, optimally culture medium represents less than about 30%, 20%, 10%, 5%, or 1% (by dry weight) of chemical precursors or non-peptide-of-interest chemicals.

[0027] The presently disclosed invention involves immunogenic fragments and variants of the various S. pneumoniae proteins. Such immunogenic fragments can comprise at least about 5, at least about 10, at least about 15, at least about 20, at least about 50, at least about 60, at least about 80, at least about 100, at least about 150, at least about 200, at least about 300, at least about 400, at least about 500, at least about 600, at least about 700, at least about 800, at least about 900, at least about 1,000 contiguous amino acid residues or up to the entire contiguous amino acid residues of the protein. Methods for obtaining such fragments are known in the art and are described in further detail elsewhere herein.

[0028] By “variant” is intended substantially similar sequences. Thus, immunogenic variants include sequences that are functionally equivalent to the protein sequence of interest and retain immunogenic activity. Generally, amino acid sequence variants of the invention will have at least 40%, at least about 50%, at least about 70%, at least about 75%, at least about 80%, at least about 85%, at least about 90%, at least about 91%, at least about 92%, at least about 93%, at least about 94%, at least about 95%, at least about 96%, at least about 97%, at least about 98%, or at least about 99% sequence identity to a respective amino acid sequence. Methods of determining sequence identity are also discussed elsewhere herein.

[0029] While the proteins identified in the presently disclosed screens were derived from the ferret-transmissible BHN97 (serotype 19F) strain, the immunogenic polypeptides used in the presently disclosed compositions and methods may be derived from any strain or serotype of S. pneumoniae. There are more than 90 serotypes known, with the most commonly used vaccines targeting 13 (1, 3, 4, 5, 6A, 6B, 7F, 9V, 14, 19A, 19F, 18C, and 23F) or 23 of these (1, 2, 3, 4, 5, 6B, 7F, 8, 9N, 9V, 10A, 11A, 12F, 14, 15B, 17F, 18C, 19F, 19A, 20, 22F, 23F, and 33F). Thus, in some embodiments, the immunogenic S. pneumoniae polypeptides are derived from any one of serotypes 1, 2, 3, 4, 5, 6A, 6B, 7F, 8, 9N, 9V, 10A, 11A, 12F, 14, 15B, 17F, 18C, 19A, 19F, 20, 22F, 23F, and 33F, or a combination thereof. In some embodiments, the immunogenic polypeptide is one that is conserved in sequence (fully conserved or comprise conservative amino acid differences) among two or more of the sequenced strains of S. pneumoniae. The BHN97 (serotype 19F) genome can be found at NCBI Accession No. PRJNA420094.

[0030] With respect to the amino acid sequences for the various full length polypeptides, variants include those polypeptides that are derived from the native polypeptides by deletion (so-called truncation) or addition of one or more amino acids to the N-terminal and/or C-terminal end of the native polypeptide; deletion or addition of one or more amino acids at one or more sites in the native polypeptide; or substitution of one or more amino acids at one or more sites in the native polypeptide. Such variants may result from, for example, genetic polymorphism or from human manipulation. Methods for mutagenesis and nucleotide sequence alterations are well known in the art. See, for example, Walker and Gaastra, eds. (1983) Techniques in Molecular Biology (MacMillan Publishing Company, New York); Kunkel (1985) Proc. Natl. Acad. Sci. USA 82:488-492; Kunkel et al. (1987) Methods Enzymol. 154:367-382; Sambrook et al. (1989) Molecular Cloning: A Laboratory Manual (2d ed., Cold Spring Harbor Laboratory Press, Plainview, N.Y.); U.S. Pat. No. 4,873,192; and the references cited therein; herein incorporated by reference. Guidance as to appropriate amino acid substitutions that may not affect biological activity of the various proteins may be found in the model of Dayhoff et al. (1978) Atlas of Polypeptide Sequence and Structure (Natl. Biomed. Res. Found., Washington, D.C.), herein incorporated by reference. Conservative substitutions, such as exchanging one amino acid with another having similar properties, may be preferred. The deletions, insertions, and substitutions of the protein sequences encompassed herein are not expected to produce radical changes in the characteristics of the protein. However, when it is difficult to predict the exact effect of the substitution, deletion, or insertion in advance of doing so, one skilled in the art will appreciate that the effect will be evaluated by routine screening assays.

[0031] By “sequence identity” is intended the same nucleotides or amino acid residues are found within the variant sequence and a reference sequence when a specified, contiguous segment of the nucleotide sequence or amino acid sequence of the variant is aligned and compared to the nucleotide sequence or amino acid sequence of the reference sequence. Methods for sequence alignment and for determining identity between sequences are well known in the art. With respect to optimal alignment of two nucleotide sequences, the contiguous segment of the variant nucleotide sequence may have additional nucleotides or deleted nucleotides with respect to the reference nucleotide sequence. Likewise, for purposes of optimal alignment of two amino acid sequences, the contiguous segment of the variant amino acid sequence may have additional amino acid residues or deleted amino acid residues with respect to the reference amino acid sequence. The contiguous segment used for comparison to the reference nucleotide sequence or reference amino acid sequence will comprise at least 20 contiguous nucleotides, or amino acid residues, and may be 30, 40, 50, 100, or more nucleotides or amino acid residues. Corrections for increased sequence identity associated with inclusion of gaps in the variant's nucleotide sequence or amino acid sequence can be made by assigning gap penalties. Methods of sequence alignment are well known in the art.

[0032] The determination of percent identity between two sequences can be accomplished using a mathematical algorithm. For example, percent identity of an amino acid sequence can be determined using the Smith-Waterman homology search algorithm using an affine 6 gap search with a gap open penalty of 12 and a gap extension penalty of 2, BLOSUM matrix 62. Alternatively, percent identity of a nucleotide sequence is determined using the Smith-Waterman homology search algorithm using a gap open penalty of 25 and a gap extension penalty of 5. Such a determination of sequence identity can be performed using, for example, the DeCypher Hardware Accelerator from TimeLogic Version G. The Smith-Waterman homology search algorithm is taught in Smith and Waterman (1981) Adv. Appl. Math 2:482-489, herein incorporated by reference. Alternatively, the alignment program GCG Gap (Wisconsin Genetic Computing Group, Suite Version 10.1) using the default parameters may be used. The GCG Gap program applies the Needleman and Wunch algorithm and for the alignment of nucleotide sequences with an open gap penalty of 3 and an extend gap penalty of 1 may be used. Another preferred, non-limiting example of a mathematical algorithm utilized for the comparison of two sequences is the algorithm of Karlin and Altschul (1990) Proc. Natl. Acad. Sci. USA 87:2264, modified as in Karlin and Altschul (1993) Proc. Natl. Acad. Sci. USA 90:5873-5877. Such an algorithm is incorporated into the NBLAST and) (BLAST programs of Altschul et al. (1990) J. Mol. Biol. 2/5:403. BLAST nucleotide searches can be performed with the NBLAST program, score=100, wordlength 12, to obtain nucleotide sequences having sufficient sequence identity. BLAST protein searches can be performed with the) (BLAST program, score=50, wordlength=3, to obtain amino acid sequences having sufficient sequence identity. To obtain gapped alignments for comparison purposes, Gapped BLAST can be utilized as described in Altschul et al. (1997) Nucleic Acids Res. 25:3389. Alternatively, PSI-Blast can be used to perform an iterated search that detects distant relationships between molecules. See Altschul et al. (1997) supra. When utilizing BLAST, Gapped BLAST, and PSI-Blast programs, the default parameters of the respective programs (e.g., XBLAST and NBLAST) can be used. See www.ncbi.nlm.nih.gov. Another non-limiting example of a mathematical algorithm utilized for the comparison of sequences is the algorithm of Myers and Miller (1988) CABIOS 4:11-17. Such an algorithm is incorporated into the ALIGN program (version 2.0), which is part of the GCG sequence alignment software package. When utilizing the ALIGN program for comparing amino acid sequences, a PAM120 weight residue table, a gap length penalty of 12, and a gap penalty of 4 can be used.

[0033] The presently disclosed vaccine compositions comprise immunogenic polypeptides. The term “immunogenic” or “immunogenic activity” refers to the ability of a polypeptide to elicit an immunological response in a subject (e.g., a mammal). An immunological response to a polypeptide is the development in an animal of a cellular and/or antibody-mediated immune response to the polypeptide. Usually, an immunological response includes but is not limited to one or more of the following effects: the production of antibodies, B cells, helper T cells, suppressor T cells and/or cytotoxic T cells, directed to an epitope or epitopes of the polypeptide. The term “epitope” refers to the site on an antigen to which specific B cells and/or T cells respond so that antibody is produced. The immunogenicity of a polypeptide can be assayed for by measuring the level of antibodies or T cells produced against the polypeptide. Assays to measure for the level of antibodies are known, for example, see Harlow and Lane (1988) Antibodies, A Laboratory Manual (Cold Spring Harbor Publications, New York), for a standard description of antibody generation, immunoassay formats and conditions that can be used to determine specific immunoreactivity. Assays for T cells specific to a polypeptide are known. See, for example, Rudraraju et al. (2011) Virology 410:429-36, herein incorporated by reference.

[0034] In some embodiments, the immunogenic polypeptide comprises a fusion protein. In some of these embodiments, the fusion protein comprises not only the S. pneumoniae protein that is required for or involved in mammalian transmission, but also an additional S. pneumoniae immunogen (such as one that inhibits colonization), a peptide adjuvant, a tag or a combination thereof. Adjuvants generally are substances that can enhance the immunogenicity of polypeptides. Adjuvants may play a role in both acquired and innate immunity (e.g., toll-like receptors) and may function in a variety of ways, not all of which are understood. For example, the peptide adjuvant can comprise at least one of a tetanus toxoid, pneumolysis keyhole limpet hemocyanin or the like. Conjugation may be direct or indirect (e.g., via a linker). A tag may be N-terminal or C-terminal For instance, tags may be added to polypeptide to facilitate purification, detection, solubility, or confer other desirable characteristics on the protein. For instance, a purification tag may be a peptide, oligopeptide, or polypeptide that may be used in affinity purification. Examples include His, GST, TAP, FLAG, myc, HA, MBP, VSV-G, thioredoxin, V5, avidin, streptavidin, BCCP, Calmodulin, Nus, S tags, lipoprotein D, and β-galactosidase.

[0035] In certain embodiments, a S. pneumoniae protein or immunogenic fragment or variant thereof is covalently bound to another molecule. This may, for example, increase the half-life, solubility, bioavailability, or immunogenicity of the antigen. Molecules that may be covalently bound to the antigen include a carbohydrate, biotin, poly(ethylene glycol) (PEG), polysialic acid, N-propionylated polysialic acid, nucleic acids, polysaccharides, and PLGA. There are many different types of PEG, ranging from molecular weights of below 300 g/mol to over 10,000,000 g/mol. PEG chains can be linear, branched, or with comb or star geometries. In some embodiments, the naturally produced form of a protein is covalently bound to a moeity that stimulates the immune system. An example of such a moeity is a lipid moeity. In some instances, lipid moieties are recognized by a Toll-like receptor (TLR) such as TLR2, and activate the innate immune system.

[0036] The presently disclosed vaccine compositions comprise an immunogenic polypeptide and a pharmaceutically acceptable carrier. As used herein, the term “pharmaceutically acceptable carrier” is intended to include any and all solvents, dispersion media, coatings, antibacterial and antifungal agents, isotonic and absorption delaying agents, and the like, compatible with pharmaceutical administration. The use of such media and agents for pharmaceutically active substances is well known in the art. Except insofar as any conventional media or agent is incompatible with the active compound, use thereof in the compositions is contemplated. Supplementary active compounds can also be incorporated into the compositions. In certain embodiments, the presently disclosed vaccine compositions comprise a non-naturally occurring pharmaceutically acceptable carrier. That is, a carrier that is not normally found in nature or not normally found in nature in combination with the immunogenic polypeptide.

[0037] In one embodiment, the vaccine composition is in bulk or in unit dosage form. The unit dosage form is any of a variety of forms, including, for example, a capsule, an IV bag, a tablet, a single pump on an aerosol inhaler or a vial. The quantity of active ingredient in a unit dose of composition is an effective amount and is varied according to the particular treatment involved. One skilled in the art will appreciate that it is sometimes necessary to make routine variations to the dosage depending on the age and condition of the patient. The dosage will also depend on the route of administration. A variety of routes are contemplated, including oral, pulmonary, rectal, parenteral, transdermal, subcutaneous, intravenous, intramuscular, intraperitoneal, inhalational, buccal, sublingual, intrapleural, intrathecal, intranasal, and the like. Dosage forms for the topical or transdermal administration of a compound of this invention include powders, sprays, ointments, pastes, creams, lotions, gels, solutions, patches and inhalants. In one embodiment, the active compound (i.e., immunogenic polypeptide comprising S. pneumoniae protein or variant or fragment thereof) is mixed under sterile conditions with a pharmaceutically acceptable carrier, and with any preservatives, buffers or propellants that are required. In specific embodiments the immunogenic polypeptide is administered as a solution, dispersion, suspension, powder, capsule, tablet, pill, time release capsule, time release tablet, and/or time release pill.

[0038] Moreover, the administration may be by continuous infusion or by single or multiple boluses. In specific embodiments, an immunogenic polypeptide can be infused over a period of less than about 4 hours, 3 hours, 2 hours or 1 hour. In still other embodiments, the infusion occurs slowly at first and then is increased over time.

[0039] Vaccine compositions suitable for injectable use include sterile aqueous solutions (where water soluble) or dispersions and sterile powders for the extemporaneous preparation of sterile injectable solutions or dispersion. For intravenous administration, suitable carriers include physiological saline, bacteriostatic water, Cremophor EL (BASF, Parsippany, N.J.) or phosphate buffered saline (PBS). In all cases, the composition must be sterile and should be fluid to the extent that easy syringeability exists. It must be stable under the conditions of manufacture and storage and must be preserved against the contaminating action of microorganisms such as bacteria and fungi. The carrier can be a solvent or dispersion medium containing, for example, water, ethanol, polyol (for example, glycerol, propylene glycol, and liquid polyethylene glycol, and the like), and suitable mixtures thereof. The proper fluidity can be maintained, for example, by the use of a coating such as lecithin, by the maintenance of the required particle size in the case of dispersion and by the use of surfactants. Prevention of the action of microorganisms can be achieved by various antibacterial and antifungal agents, for example, parabens, chlorobutanol, phenol, ascorbic acid, thimerosal, and the like. In many cases, it will be preferable to include isotonic agents, for example, sugars, polyalcohols such as manitol, sorbitol, sodium chloride in the composition. Prolonged absorption of the injectable compositions can be brought about by including in the composition an agent which delays absorption, for example, aluminum monostearate and gelatin.

[0040] Sterile injectable solutions can be prepared by incorporating the active compound in the required amount in an appropriate solvent with one or a combination of ingredients enumerated above, as required, followed by filtered sterilization. Generally, dispersions are prepared by incorporating the active compound into a sterile vehicle that contains a basic dispersion medium and the required other ingredients from those enumerated above. In the case of sterile powders for the preparation of sterile injectable solutions, methods of preparation are vacuum drying and freeze-drying that yields a powder of the active ingredient plus any additional desired ingredient from a previously sterile-filtered solution thereof.

[0041] Oral compositions generally include an inert diluent or an edible pharmaceutically acceptable carrier. They can be enclosed in gelatin capsules or compressed into tablets. For the purpose of oral therapeutic administration, the active compound can be incorporated with excipients and used in the form of tablets, troches, or capsules. Oral compositions can also be prepared using a fluid carrier for use as a mouthwash, wherein the compound in the fluid carrier is applied orally and swished and expectorated or swallowed. Pharmaceutically compatible binding agents, and/or adjuvant materials can be included as part of the composition. The tablets, pills, capsules, troches and the like can contain any of the following ingredients, or compounds of a similar nature: a binder such as microcrystalline cellulose, gum tragacanth or gelatin; an excipient such as starch or lactose, a disintegrating agent such as alginic acid, Primogel, or corn starch; a lubricant such as magnesium stearate or Sterotes; a glidant such as colloidal silicon dioxide; a sweetening agent such as sucrose or saccharin; or a flavoring agent such as peppermint, methyl salicylate, or orange flavoring.

[0042] In some embodiments, the vaccine composition is formulated for intranasal administration (i.e., inhalation) or pulmonary delivery. For administration by inhalation, the compounds are delivered in the form of an aerosol spray from pressured container or dispenser, which contains a suitable propellant, e.g., a gas such as carbon dioxide, or a nebulizer. Systemic administration can also be by transmucosal or transdermal means. For transmucosal or transdermal administration, penetrants appropriate to the barrier to be permeated are used in the formulation. Such penetrants are generally known in the art, and include, for example, for transmucosal administration, detergents, bile salts, and fusidic acid derivatives. Transmucosal administration can be accomplished through the use of nasal sprays or suppositories. For transdermal administration, the active compounds are formulated into ointments, salves, gels, or creams as generally known in the art.

[0043] The presently disclosed vaccine compositions may comprise an adjuvant or an additional S. pneumoniae immunogen (such as one that inhibits colonization), which can be fused to the immunological polypeptide as described elsewhere herein. Alternatively, the vaccine compositions can be administered along with an adjuvant or an additional S. pneumoniae immunogen (such as one that inhibits colonization), through either simultaneous or subsequent administration. Many substances, both natural and synthetic, have been shown to function as adjuvants. For example, adjuvants may include, but are not limited to, mineral salts, squalene mixtures, muramyl peptide, saponin derivatives, mycobacterium cell wall preparations, certain emulsions, mineral gels such as aluminum hydroxide, surface active substances such as lysolecithin, pluronic polyols, polyanions, peptides, oil or hydrocarbon emulsions, dinitrophenol, monophosphoryl lipid A, mycolic acid derivatives, nonionic block copolymer surfactants, Quil A, complete Freund's adjuvant, incomplete Freund's adjuvant, cholera toxin B subunit, polyphosphazene and derivatives, immunostimulating complexes (ISCOMs), cytokine adjuvants, MF59 adjuvant, lipid adjuvants, mucosal adjuvants, certain bacterial exotoxins and other components, certain oligonucleotides, PLG, and others.

4. Methods for Reducing the Transmissibility of S. pneumoniae and Incidence Rate of Invasive Disease

[0044] Methods are provided for reducing the mammalian transmission of S. pneumoniae by administering to a mammalian subject infected with S. pneumoniae or at risk of infection by S. pneumoniae a vaccine composition comprising at least one immunogenic polypeptide comprising at least one S. pneumoniae protein that is required for or involved in mammalian transmission of S. pneumoniae. In some embodiments, the S. pneumoniae protein required for or involved in mammalian transmission of S. pneumoniae has an amino acid sequence set forth as any one of SEQ ID NOs: 1, 2, 3, 4, 5, 6, 7, 8, 9, 10, 11, 12, 13, 14, 15, 16, 17, 18, 19, 20, 21, 22, 23, 24, 25, 26, 27, 28, 29, 30, 31, 32, 33, 34, 35, 36, 37, 38, 39, 40, 41, 42, 43, 44, 45, 46, 47, 48, 49, 50, 51, 52, 53, 54, 55, 56, 57, 58, 59, 60, 61, 62, 63, 64, 65, 66, 67, 68, 69, 70, 71, 72, 73, 74, 75, 76, 77, 78, 79, 80, 81, 82, 83, 84, 85, 86, 87, 88, 89, 90, 91, 92, 93, 94, 95, 96, 97, 98, 99, 100, 101, 102, 103, 104, 105, 106, 107, 108, 109, 110, 111, 112, 113, 114, 115, 116, 117, 118, 119, 120, 121, 122, 123, 124, 125, 126, 127, 128, 129, 130, 131, 132, 133, 134, 135, 136, 137, 138, 139, 140, 141, 142, 143, 144, 145, 146, 147, 148, 149, 150, 151, 152, 153, 154, 155, 156, 157, 158, 159, 160, 161, 162, 163, 164, 165, 166, 167, 168, 169, 170, 171, 172, 173, 174, 175, 176, 177, 178, 179, 180, 181, 182, 183, 184, 185, 186, 187, 188, 189, 190, 191, 192, 193, 194, 195, 196, 197, 198, 199, 200, 201, 202, 203, 204, and 205, or an immunogenic fragment or variant of any thereof, and a non-naturally occurring pharmaceutically acceptable carrier.

[0045] As used herein, a “mammalian subject” can be any mammal, e.g., a human, primate, bird, mouse, rat, fowl, dog, cat, cow, horse, goat, rabbit, camel, sheep or a pig. In certain embodiments, the mammal is a human. In some embodiments, the human being administered the vaccine composition can be a newborn, infant, toddler, preadolescent, adolescent, or adult.

[0046] In particular embodiments, the mammalian subject is infected with S. pneumoniae or at risk of infection by S. pneumoniae. Although any individual has a certain risk of becoming infected with S. pneumoniae, certain sub-populations have an increased risk of infection. Those with a higher risk of infection include, but are not limited to, mammals whose immune system is compromised and/or have chronic illnesses, newborns, infants, toddlers, seniors, children or adults with asplenia, splenic dysfunction, sickle-cell disease, cochlear implants or cerebrospinal fluid leaks, childcare workers, and healthcare workers.

[0047] As used herein, the term “transmission” refers to the mammal-to-mammal spread of S. pneumoniae by direct contact with respiratory secretions, such as saliva or mucus. In some embodiments, the presently disclosed compositions and methods reduce transmission of S. pneumoniae from a mother to an offspring—prenatally, postnatally, or both.

[0048] The compositions and methods disclosed herein result in the reduced mammalian transmission of S. pneumoniae. Specifically, those mammals that have been administered the vaccine compositions disclosed herein are less likely to transmit S. pneumoniae if or when they are infected with the bacteria than a mammal that has not received the vaccine composition. In some embodiments, the transmission rate from a vaccinated mammal or population thereof to another vaccinated or non-vaccinated mammal or population thereof is reduced by at least about 5%, 10%, 20%, 30%, 40%, 50%, 60%, 70%, 80%, 90%, 95%, 96%, 97%, 98%, 99%, 100%, 5-10%, 10-20%, 10-30%, 10-40%, 20-30%, 20-40%, 30-40%, 30-50%, 40-50%, 40-60%, 50-60%, 50-70%, 60-70%, 60-80%, 70-80%, 70-90%, 80-90%, 80-100%, 90-100%, or 95-100% when compared to a mammal that has not received the vaccine composition disclosed herein or a population thereof. A “mammalian population” refers to a group of more than one mammal.

[0049] The mammalian transmission rate can be measured using any method known in the art, including those described in the examples. For example, mammalian transmission rates can be determined by measuring the colonization of S. pneumoniae within members of a population comprising at least one individual subject that has been infected with S. pneumoniae and wherein all other members of the population have been brought into physical contact with the infected individual(s), followed by determining the infection burden of the contact mammals by quantification of viable bacteria present in the anterior nares by nasal lavage of the nares and culturing lavage fluid, or by direct contact of the anterior nares with bacteriological growth media.

[0050] In another aspect, methods are provided for reducing the mammalian transmissibility of S. pneumoniae by reducing the levels or activity of a S. pneumoniae protein required for or involved in mammalian transmission of S. pneumoniae. In some embodiments, the S. pneumoniae protein required for or involved in mammalian transmission of S. pneumoniae has an amino acid sequence set forth as any one of SEQ ID NOs: 1, 2, 3, 4, 5, 6, 7, 8, 9, 10, 11, 12, 13, 14, 15, 16, 17, 18, 19, 20, 21, 22, 23, 24, 25, 26, 27, 28, 29, 30, 31, 32, 33, 34, 35, 36, 37, 38, 39, 40, 41, 42, 43, 44, 45, 46, 47, 48, 49, 50, 51, 52, 53, 54, 55, 56, 57, 58, 59, 60, 61, 62, 63, 64, 65, 66, 67, 68, 69, 70, 71, 72, 73, 74, 75, 76, 77, 78, 79, 80, 81, 82, 83, 84, 85, 86, 87, 88, 89, 90, 91, 92, 93, 94, 95, 96, 97, 98, 99, 100, 101, 102, 103, 104, 105, 106, 107, 108, 109, 110, 111, 112, 113, 114, 115, 116, 117, 118, 119, 120, 121, 122, 123, 124, 125, 126, 127, 128, 129, 130, 131, 132, 133, 134, 135, 136, 137, 138, 139, 140, 141, 142, 143, 144, 145, 146, 147, 148, 149, 150, 151, 152, 153, 154, 155, 156, 157, 158, 159, 160, 161, 162, 163, 164, 165, 166, 167, 168, 169, 170, 171, 172, 173, 174, 175, 176, 177, 178, 179, 180, 181, 182, 183, 184, 185, 186, 187, 188, 189, 190, 191, 192, 193, 194, 195, 196, 197, 198, 199, 200, 201, 202, 203, 204, and 205.

[0051] In yet another aspect, methods are provided for reducing the mammalian transmissibility of S. pneumoniae by increasing the levels or activity of a S. pneumoniae protein that decreases tolerance of desiccation stress.

[0052] As used herein, “desiccation” refers to the state of S. pneumoniae outside of a liquid culture at ambient temperatures and humidity levels. As used herein, “tolerance of desiccation stress” refers to the ability of S. pneumoniae to remain viable after desiccation. In some embodiments, S. pneumoniae may remain viable after at least about 1 hour, 2 hours, 3 hours, 4 hours, 5 hours, 6 hours, 7 hours, 8 hours, 9 hours, 10 hours, 11 hours, 12 hours, 13 hours, 14 hours, 15 hours, 16 hours, 17 hours, 18 hours, 19 hours, 20 hours, 21 hours, 22 hours, 23 hours, 1 day, 1.5 days, 2 days, 2.5 days, 3 days, 3.5 days, 4 days, 4.5 days, 5 days, 5.5 days, 6 days, 6.5 days, 1 week, 1.5 weeks, 2 weeks, 2.5 weeks, 3 weeks, 3.5 weeks, 1 month, 1.5 months, 2 months, 3 months or more.

[0053] In some embodiments, the tolerance of desiccation stress is reduced in S. pneumoniae with increased levels or activity of a S. pneumoniae protein that decreases tolerance of desiccation stress such that the length of desiccation after which the engineered S. pneumoniae is still viable is reduced by at least about 5%, 10%, 20%, 30%, 40%, 50%, 60%, 70%, 80%, 90%, 95%, 96%, 97%, 98%, 99%, 100%, 5-10%, 10-20%, 10-30%, 10-40%, 20-30%, 20-40%, 30-40%, 30-50%, 40-50%, 40-60%, 50-60%, 50-70%, 60-70%, 60-80%, 70-80%, 70-90%, 80-90%, 80-100%, 90-100%, or 95-100% when compared to a proper control S. pneumoniae (e.g., a S. pneumoniae of the same strain in which the levels or activity of these proteins have not been manipulated by the hand of man).

[0054] In some embodiments, the S. pneumoniae protein that decreases tolerance of desiccation stress is a spxB protein or a spxR protein. In some of these embodiments, the spxB protein has an amino acid sequence set forth as SEQ ID NO: 228 or a variant or fragment thereof.

SEQ ID NO: 228
MTQGKITASAAMLNVLKTWGVDTIYGIPSGTLSSLMDALAEDKDIRFLQV
RHEETGALAAVMQAKFGGSIGVAVGSGGPGATHLINGVYDAAMDNTPFLA
ILGSRPVNELNMDAFQELNQNPMYNGIAVYNKRVAYAEQLPKVIDEACRA
AVSKKGPAVVEIPVNFGFQEIDENSYYGSGSYERSFIAPALNEVEIDKAV
EILNNAERPVIYAGFGGVKAGEVITELSRKIKAPIITTGKNFEAFEWNYE
GLTGSAYRVGWKPANEVVFEADTVLFLGSNFPFAEVYEAFKNTEKFIQVD
IDPYKLGKRHALDASILGDAGQAAKAILDKVNPVESTPWWRANVKNNQNW
RDYMNKLEGKTEGELQLYQVYNAINKHADQDAIYSIDVGNTTQTSTRHLH
MTPKNMWRTSPLFATMGIALPGGIAAKKDNPDRQVWNIMGDGAFNMCYPD
VITNVQYDLPVINLVFSNAEYGFIKNKYEDTNKHLFGVDFTNADYAKIAE
AQGAVGFTVDRIEDIDAVVAEAVKLNKEGKTVVIDARITQHRPLPVEVLE
LDPKLHSEEAIKAFKEKYEAEELVPFRLFLEEEGLQSRAIK

[0055] In other embodiments, the spxR protein has an amino acid sequence set forth as SEQ ID NO: 229 or a variant or fragment thereof.

SEQ ID NO: 229
MSKHQEILSYLEELPVGKRVSVRSISNHLGVSDGTAYRAIKEAENRGIVE
TRPRSGTIRVKSQKVAIERLTFAEIAEVTSSEVLAGQEGLEREFSKFSIG
AMTEQNILSYLHDGGLLIVGDRTRIQLLALENENAVLVTGGFQVHDDVLK
LANQKGIPVLRSKHDTFTVATMINKALSNVQIKTDILTVEKLYRPSHEYG
FLRETDTVKDYLDLVRKNRSSRFPVINQHQVVVGVVTMRDAGDKSPSTTI
DKVMSRSLFLVGLSTNIANVSQRMIAEDFEMVPVVRSNQTLLGVVTRRDV
MEKMSRSQVSALPTFSEQIGQKLSYHHDEVVITVEPFMLEKNGVLANGVL
AEILTHMTQDLVVNSGRNLIIEQMLIYFLQAVQIDDILRIQARIIHHTRR
SAIIDYDIYHGHQIVSKANVTVKIN

[0056] As used herein, “mammalian transmissibility” refers to the ability of a S. pneumoniae bacterium to be transmitted from one infected mammal to another mammal by direct contact with respiratory secretions, such as saliva or mucus.

[0057] In some embodiments, the mammalian transmissibility of a S. pneumoniae in which the levels or activity of at least one S. pneumoniae protein required for or involved in mammalian transmission of S. pneumoniae is reduced, or a S. pneumoniae in which the levels or activity of at least one S. pneumoniae protein that decreases tolerance of desiccation stress is increased, is reduced by at least about 5%, 10%, 20%, 30%, 40%, 50%, 60%, 70%, 80%, 90%, 95%, 96%, 97%, 98%, 99%, 100%, 5-10%, 10-20%, 10-30%, 10-40%, 20-30%, 20-40%, 30-40%, 30-50%, 40-50%, 40-60%, 50-60%, 50-70%, 60-70%, 60-80%, 70-80%, 70-90%, 80-90%, 80-100%, 90-100%, or 95-100% when compared to a proper control S. pneumoniae (e.g., a S. pneumoniae of the same strain in which the levels or activity of these proteins have not been manipulated by the hand of man).

[0058] In some embodiments, the levels or activity of a S. pneumoniae protein is specifically increased or reduced. As used herein, the term “specifically” means the ability of a molecule or method to increase or reduce the levels or activity of a S. pneumoniae protein without impacting the level or activity of other proteins.

[0059] Methods of increasing levels of a S. pneumoniae protein are known in the art and include bacterial transformation of a polynucleotide encoding the S. pneumoniae protein or an active variant or fragment thereof or the introduction of the protein itself or an active variant or fragment thereof. Alternatively, the expression level of the gene encoding the S. pneumoniae protein can be activated by introducing transcription factors that activate the promoter regulating the transcription of the gene.

[0060] In some embodiments, levels of the S. pneumoniae protein can be reduced by reducing the expression of a gene encoding the same by any method known in the art. For example, the expression of a gene can be reduced by using antisense RNA, by knocking out the gene, using RNA-guided CRISPR enzymes, such as a nuclease deficient Cas enzyme that is fused to a transcriptional repressor domain, engineered zinc finger nucleases, transcription activator-like effector nucleases (TALEN5), or peptide nucleic acids.

[0061] Reduction (i.e., decreasing) of the levels of a S. pneumoniae protein can be achieved by any means known in the art. For example, gene expression can be decreased by a mutation. The mutation can be an insertion, a deletion, a substitution or a combination thereof, provided that the mutation leads to a decrease in the expression of the S. pneumoniae protein. In specific embodiments, recombinant DNA technology can be used to introduce a mutation into a specific site on the chromosome. Such a mutation may be an insertion, a deletion, a replacement of one nucleotide by another one or a combination thereof, as long as the mutated gene leads to a decrease in the expression of a S. pneumoniae protein. Such a mutation can be made by deletion of a number of base pairs. In one embodiment, the deletion of one single base pair could render a gene encoding a S. pneumoniae protein non-functional, thereby decreasing the levels of a S. pneumoniae protein, since as a result of such a mutation, the other base pairs are no longer in the correct reading frame. In other embodiments, multiple base pairs are removed, such as about 2, 5, 10, 20, 30, 40, 50, 75, 100, 150, 200, 300, 400, 500, or more base pairs. In still other embodiments, the entire length of the gene encoding a S. pneumoniae protein is deleted. Mutations introducing a stop-codon in the open reading frame, or mutations causing a frame-shift in the open reading frame could be used to reduce the expression of a gene encoding a S. pneumoniae protein.

[0062] Other techniques for decreasing the expression of a gene encoding a S. pneumoniae protein are well-known in the art. For example, techniques may include modification of the gene by site-directed mutagenesis, restriction enzyme digestion followed by re-ligation, PCR-based mutagenesis techniques, allelic exchange, allelic replacement, RNA-guided CRISPR enzymes, or post-translational modification. Standard recombinant DNA techniques are all known in the art and described in Maniatis/Sambrook (Sambrook, J. et al. Molecular cloning: a laboratory manual. ISBN 0-87969-309-6). Site-directed mutations can be made by means of in vitro site directed mutagenesis using methods well known in the art.

[0063] Inhibitory molecules, such as inhibitory small molecules, nucleic acid molecules, such as antisense RNA, ribozymes, peptides, antibodies, antagonists, aptamers, and peptidomimetics that reduce the levels or activity of a S. pneumoniae protein can be introduced into S. pneumoniae cells using any method known in the art for introduction of molecules into bacterial cells. By “introducing” is intended presenting to the bacterial cell the expression cassette, mRNA, or polypeptide in such a manner that the sequence gains access to the interior of the bacterial cell. The methods provided herein do not depend on a particular method for introducing an expression cassette or sequence into a bacterial cell, only that the polynucleotide or polypeptide gains access to the interior of at least one bacterial cell. Methods for introducing sequences into bacterial cells are known in the art and include, but are not limited to, stable transformation methods, transient transformation methods, and virus-mediated methods.

[0064] In specific embodiments, the levels or activity of a S. pneumoniae protein is reduced or increased by at least about 5%, 10%, 20%, 30%, 40%, 50%, 60%, 70%, 80%, 90%, 95%, 96%, 97%, 98%, 99%, 100%, 5-10%, 10-20%, 10-30%, 10-40%, 20-30%, 20-40%, 30-40%, 30-50%, 40-50%, 40-60%, 50-60%, 50-70%, 60-70%, 60-80%, 70-80%, 70-90%, 80-90%, 80-100%, 90-100%, or 95-100% when compared to a proper control S. pneumoniae (e.g., a S. pneumoniae of the same strain in which the levels or activity of these proteins have not been manipulated by the hand of man). Gene or protein expression can be measured by any means known in the art.

[0065] Methods are also provided for reducing the incidence rate of at least one invasive disease caused by S. pneumoniae in a mammalian population by administering to at least one mammalian subject within the mammalian population a vaccine composition comprising at least one immunogenic polypeptide comprising at least one S. pneumoniae protein that is required for or involved in mammalian transmission of S. pneumoniae. In some embodiments, the S. pneumoniae protein required for or involved in mammalian transmission of S. pneumoniae has an amino acid sequence set forth as any one of SEQ ID NOs: 1, 2, 3, 4, 5, 6, 7, 8, 9, 10, 11, 12, 13, 14, 15, 16, 17, 18, 19, 20, 21, 22, 23, 24, 25, 26, 27, 28, 29, 30, 31, 32, 33, 34, 35, 36, 37, 38, 39, 40, 41, 42, 43, 44, 45, 46, 47, 48, 49, 50, 51, 52, 53, 54, 55, 56, 57, 58, 59, 60, 61, 62, 63, 64, 65, 66, 67, 68, 69, 70, 71, 72, 73, 74, 75, 76, 77, 78, 79, 80, 81, 82, 83, 84, 85, 86, 87, 88, 89, 90, 91, 92, 93, 94, 95, 96, 97, 98, 99, 100, 101, 102, 103, 104, 105, 106, 107, 108, 109, 110, 111, 112, 113, 114, 115, 116, 117, 118, 119, 120, 121, 122, 123, 124, 125, 126, 127, 128, 129, 130, 131, 132, 133, 134, 135, 136, 137, 138, 139, 140, 141, 142, 143, 144, 145, 146, 147, 148, 149, 150, 151, 152, 153, 154, 155, 156, 157, 158, 159, 160, 161, 162, 163, 164, 165, 166, 167, 168, 169, 170, 171, 172, 173, 174, 175, 176, 177, 178, 179, 180, 181, 182, 183, 184, 185, 186, 187, 188, 189, 190, 191, 192, 193, 194, 195, 196, 197, 198, 199, 200, 201, 202, 203, 204, and 205, or an immunogenic fragment or variant of any thereof, and a non-naturally occurring pharmaceutically acceptable carrier.

[0066] The incidence rate of any invasive disease caused by S. pneumoniae within a population can be reduced by the presently disclosed methods and compositions. S. pneumoniae is considered “invasive” when it is found in the blood, cerebrospinal fluid, pleural fluid, joint fluid, peritoneal fluid, or other normally sterile sites. Non-limiting examples of invasive diseases caused by S. pneumoniae include pneumonia, otitis media, bacterial meningitis, bacteremia, sinusitis, septic arthritis, osteomyelitis, peritonitis, sepsis, and endocarditis.

[0067] As used herein, “incidence rate” refers to the numbers or percentage of subjects within a population that have newly acquired an invasive disease. Administering to at least one mammalian subject within a mammalian population a presently disclosed vaccine composition can reduce the incidence rate within the population of an invasive disease caused by S. pneumoniae by at least about 5%, 10%, 20%, 30%, 40%, 50%, 60%, 70%, 80%, 90%, 95%, 96%, 97%, 98%, 99%, 100%, 5-10%, 10-20%, 10-30%, 10-40%, 20-30%, 20-40%, 30-40%, 30-50%, 40-50%, 40-60%, 50-60%, 50-70%, 60-70%, 60-80%, 70-80%, 70-90%, 80-90%, 80-100%, 90-100%, or 95-100% when compared to a mammalian population in which none of the individual mammals were administered a presently disclosed vaccine composition.

[0068] The presently disclosed vaccine compositions can be administered in an effective amount in order to reduce the mammalian transmission of S. pneumoniae or to reduce the incidence rates of an invasive disease caused by S. pneumoniae. In certain embodiments, an “effective amount” of a vaccine composition can be an amount sufficient to achieve the desired result (i.e., reduced mammalian transmission of S. pneumoniae or to reduce the incidence rates of an invasive disease caused by S. pneumoniae). The vaccine compositions can be administered to a subject prior to infection by S. pneumoniae or prior to an invasive disease caused by S. pneumoniae or can be administered to a subject that has been infected by S. pneumoniae or that has an invasive disease caused by S. pneumoniae or is exhibiting symptoms of the same.

[0069] Generally, the presently disclosed compositions are administered in order to reduce the transmission of S. pneumoniae to other subjects within a population, but in those embodiments wherein the vaccine composition also comprises an additional S. pneumoniae immunogen that when targeted prevents colonization of the bacteria, the vaccine composition also serves to prevent colonization or to reduce the duration of colonization and functions prophylactically, and even therapeutically, in the subject to which it has been administered to prevent colonization and subsequent invasive disease within the vaccinated subject. In some of these embodiments, the vaccine compositions confer protective immunity, allowing a vaccinated individual to exhibit delayed onset of symptoms or reduced severity of symptoms, as the result of his or her exposure to the vaccine. In certain embodiments, the reduction in severity of symptoms is at least 25%, 40%, 50%, 60%, 70%, 80% or even 90%. In particular embodiments, vaccinated individuals may display no symptoms upon contact with S. pneumoniae, do not become colonized by S. pneumoniae, or both.

[0070] The specific effective dose level for any particular subject will depend upon a variety of factors including the specific composition employed; the age, body weight, general health, sex and diet of the patient; the time of administration; the route of administration; the rate of excretion of the composition employed; the duration of the treatment; drugs used in combination or coincidental with the specific compound employed; and like factors well known in the medical arts (see e.g., Koda-Kimble et al., (2004), Applied Therapeutics: The Clinical Use of Drugs, Lippincott Williams & Wilkins, ISBN 0781748453; Winter, (2003), Basic Clinical Pharmacokinetics, 4.sup.th ed., Lippincott Williams & Wilkins, ISBN 0781741475; Sharqel, (2004), Applied Biopharmaceutics & Pharmacokinetics, McGraw-Hill/Appleton & Lange, ISBN 0071375503). If desired, the effective daily dose may be divided into multiple doses for purposes of administration. Consequently, single dose compositions may contain such amounts or submultiples thereof to make up the daily dose. It will be understood, however, that the total daily usage of the compounds and compositions of the present disclosure will be decided by an attending physician within the scope of sound medical judgment.

[0071] Administration of compositions described herein can occur as a single event, a periodic event, or over a time course of treatment. For example, agents can be administered daily, weekly, bi-weekly, or monthly. As another example, agents can be administered in multiple treatment sessions, such as 2 weeks on, 2 weeks off, and then repeated twice; or every 3rd day for 3 weeks.

5. Methods for Identifying Additional Genetic Factors Involved in Mammalian Transmission of S. pneumoniae

[0072] Methods are provided for identifying additional genetic factors involved in mammalian transmission of S. pneumoniae. The methods comprise infecting an influenza co-infected ferret with a ferret-transmissible strain of S. pneumoniae comprising a gene mutant library, and analyzing members of the gene mutant library that are able to colonize the infected ferret but not able to transmit or had a reduced transmission rate to contact ferrets.

[0073] Any ferret-transmissible strain of S. pneumoniae may be used in the presently disclosed methods. In certain embodiments, the ferret-transmissible strain of S. pneumoniae comprises serotype 19F strain BHN97.

[0074] Any mode of administration may be used to administer the S. pneumoniae comprising the gene mutant library to the ferret, although in some embodiments, the S. pneumoniae is administered to the ferret intranasally.

[0075] As used herein, a “gene mutant library” refers to a population of organisms in which, collectively within the members of the library, each non-essential gene within the genome of the organism has been mutated. The mutations can be introduced via any method known in the art for making genetic mutations, such as site-directed mutagenesis or randomized mutagenesis. In some embodiments, the gene mutant library comprises a transposon insertion library or transposon sequence (Tn-seq) library generated using transposon insertional mutagenesis. See, for example, Carter et al. (2014) Cell Host Microbe 15:587-599; Mann et al. (2012) PLoS Pathog 8:e1002788; van Opijnen et al. (2016) PLoS Pathog 12:e1005869; Verhagen et al. (2014) PLoS One 9:e89541; each of which is incorporated herein by its entirety.

[0076] Seasonal patterns of pneumococcal disease and colonization patterns support a role of respiratory viruses in promoting pneumococcal transmission, particularly the Influenza A virus (Althouse et al. (2017) Epidemiol Infect 145:2750-2758; Grijalva et al. (2014) Clin Infect Dis 58:1369-1376). Therefore, in particular embodiments, the ferrets are co-infected with an influenza virus. In some of these embodiments, the influenza virus comprises an influenza A virus. In particular embodiments, the influenza virus comprises Influenza/A/5/97 strain (H3N2). In certain embodiments, the ferrets are infected intranasally with influenza virus. In some embodiments, the ferret is infected with influenza prior to infection with S. pneumoniae. In some of these embodiments, the ferret is infected with influenza at least about 1 hour, 2 hours, 3 hours, 4 hours, 5 hours, 6 hours, 7 hours, 8 hours, 9 hours, 10 hours, 11 hours, 12 hours, 13 hours, 14 hours, 15 hours, 16 hours, 17 hours, 18 hours, 19 hours, 20 hours, 21 hours, 22 hours, 23 hours, 1 day, 1.5 days, 2 days, 2.5 days, 3 days, 3.5 days, 4 days or more before infection with S. pneumoniae. In particular embodiments, the ferret is infected with influenza about three days prior to infection with the ferret-transmissible strain of S. pneumoniae.

[0077] Contact ferrets are those ferrets that have been put into close physical contact with the infected ferret (i.e., placed within the same cage). The bacterial burden of the donor ferret (infected ferret) and contact ferrets can be assessed via induced sneezing and/or nasal lavage collection.

[0078] Analyzing members of the gene mutant library that are able to colonize the infected ferret but not able to transmit or had a reduced transmission rate to contact ferrets can be performed using any method known in the art of sequencing, including Illumina sequencing (van Opijnen (2015) Curr Protoc Microbiol 36, 1E 3 1-24; which is incorporated by reference herein in its entirety)

[0079] Identifying those members of the gene mutant library that were not able to transmit or had a reduced transmission rate to contact ferrets can be performed using any method known in the art, including using those described in the examples.

[0080] Once the mutated gene associated with a reduced transmission rate is identified, the identified genetic factor can be deleted or mutated in a murine-transmissible strain of S. pneumoniae, such as S. pneumoniae serotype 19F strain BHN97, followed by infection of a mouse with the mutated S. pneumoniae. Following infection, the transmissibility of the mutated S. pneumoniae to contact mice can be analyzed using similar methods as those described for the ferret model.

### EMBODIMENTS

[0081] 1. A vaccine composition comprising at least one immunogenic polypeptide comprising at least one Streptococcus pneumoniae (S. pneumoniae) protein having an amino acid sequence set forth as any one of SEQ ID NOs: 1-205 or an immunogenic fragment or variant of any thereof, and a non-naturally occurring pharmaceutically acceptable carrier.

[0082] 2. The vaccine composition of embodiment 1, wherein said S. pneumoniae protein is naturally expressed on the surface of S. pneumoniae.

[0083] 3. The vaccine composition of embodiment 2, wherein said immunogenic polypeptide lacks a transmembrane domain.

[0084] 4. The vaccine composition of embodiment 1, wherein said S. pneumoniae protein is naturally expressed on the surface of S. pneumoniae when S. pneumoniae is undergoing autolysis.

[0085] 5. The vaccine composition of any one of embodiments 1-4, wherein said S. pneumoniae protein is conserved among two or more sequenced strains of S. pneumoniae.

[0086] 6. The vaccine composition of embodiment 1, wherein said S. pneumoniae protein comprises at least one choline binding protein or an immunogenic fragment or variant thereof.

[0087] 7. The vaccine composition of embodiment 6, wherein said S. pneumoniae protein comprises at least one choline binding protein having an amino acid sequence selected from the group consisting of SEQ ID NO: 27, 39, and 82; or an immunogenic fragment or variant of any thereof.

[0088] 8. The vaccine composition of embodiment 1, wherein said S. pneumoniae protein comprises at least one protein selected from the group consisting of the sensor kinase of the competence cascade (ComD), the homolog of putative C3-degrading protease (CppA), and the iron transporter PiaA, or an immunogenic fragment or variant of any thereof.

[0089] 9. The vaccine composition of embodiment 8, wherein said S. pneumoniae protein comprises at least one protein having an amino acid sequence selected from the group consisting of SEQ ID NOs: 10, 44, and 92, or an immunogenic fragment or variant of any thereof.

[0090] 10. The vaccine composition of embodiment 8 or 9, wherein said S. pneumoniae protein comprises at least one of CppA and PiaA.

[0091] 11. The vaccine composition of any one of embodiments 1-10, wherein said immunogenic polypeptide further comprises an additional pneumococcal immunogen.

[0092] 12. The vaccine composition of any one of embodiments 1-10, further comprising an additional pneumococcal immunogen.

[0093] 13. The vaccine composition of any one of embodiments 1-12, further comprising an immunological adjuvant.

[0094] 14. The vaccine composition of any one of embodiments 1-13, wherein said composition is formulated for intranasal administration.

[0095] 15. A method for reducing the mammalian transmission of Streptococcus pneumoniae (S. pneumoniae) by administering to a mammalian subject infected with S. pneumoniae or at risk of infection by S. pneumoniae a vaccine composition of any one of embodiments 1-14.

[0096] 16. The method of embodiment 15, wherein said vaccine composition is administered to said mammalian subject intranasally.

[0097] 17. The method of embodiment 15 or 16, wherein said method reduces the transmission of S. pneumoniae from a mother to its offspring.

[0098] 18. A method for reducing the incidence rate of at least one invasive disease caused by Streptococcus pneumoniae (S. pneumoniae) in a mammalian population by administering to at least one mammalian subject within said mammalian population a vaccine composition of any one of embodiments 1-14.

[0099] 19. The method of embodiment 18, wherein said vaccine composition is administered to said mammalian subject intranasally.

[0100] 20. The method of embodiment 18 or 19, wherein said method reduces the transmission of S. pneumoniae from a mother to its offspring.

[0101] 21. The method of any one of embodiments 18-20, wherein said at least one invasive disease is selected from the group consisting of pneumonia, acute otitis media, sepsis, meningitis, and bacteremia.

[0102] 22. A method for identifying genetic factors involved in mammalian transmission of Streptococcus pneumoniae (S. pneumoniae), wherein said method comprises infecting an influenza co-infected ferret with a ferret-transmissible strain of S. pneumoniae comprising a gene mutant library, and analyzing members of said gene mutant library that are able to colonize said infected ferret but not able to transmit or had a reduced transmission rate to contact ferrets to identify genetic factors involved in mammalian transmission.

[0103] 23. The method of embodiment 22, wherein said gene mutant library comprises a transposon sequencing (Tn-seq) library.

[0104] 24. The method of embodiment 22 or 23, wherein said ferret-transmissable strain of S. pneumoniae is administered to said ferret intranasally.

[0105] 25. The method of any one of embodiments 22-24, wherein said ferret-transmissible strain of S. pneumoniae comprises serotype 19F strain BHN97.

[0106] 26. The method of any one of embodiments 22-25, wherein said influenza co-infected ferret is co-infected with Influenza/A/5/97 (H3N2).

[0107] 27. The method of any one of embodiments 22-26, wherein said influenza co-infected ferret is co-infected intranasally with influenza three days prior to infection with said ferret-transmissible strain of S. pneumoniae.

[0108] 28. The method of any one of embodiments 22-27, wherein said method further comprises deletion or mutation of said identified genetic factor in a murine-transmissible strain of S. pneumoniae, infection of a mouse with said murine-transmissible strain of S. pneumoniae, and analyzing transmissibility of said murine-transmissible S. pneumoniae to contact mice.

[0109] 29. A method for reducing the mammalian transmissibility of Streptococcus pneumoniae by reducing the levels or activity of a protein having an amino acid selected from SEQ ID NOs: 1-205.

[0110] 30. A method for reducing the mammalian transmissibility of Streptococcus pneumoniae by increasing the levels or activity of a protein that decreases tolerance of desiccation stress.

[0111] 31. The method of embodiment 30, wherein said protein comprises a spxB protein or a spxR protein.

[0112] 32. The method of embodiment 31, wherein said spxB protein comprises the amino acid sequence set forth as SEQ ID NO: 228 or said spxR protein comprises the amino acid sequence set forth as SEQ ID NO: 229.

[0113] 33. The vaccine composition of any one of embodiments 1-14 for use as a medicament.

[0114] 34. The vaccine composition for use according to embodiment 33, wherein said medicament is used to reduce the transmission of Streptococcus pneumoniae.

[0115] 35. The vaccine composition of any one of embodiments 1-14 for use in reducing the transmission of Streptococcus pneumoniae.

### EXPERIMENTAL

### Example 1. Bacterial Factors Required for Transmission of Streptococcus pneumoniae in Mammalian Hosts

[0116] The first genetic screen for transmission factors in S. pneumoniae was performed by leveraging a highly saturated transposon sequencing (Tn-Seq) library of >6500 unique inserts in a ferret transmissible strain of pneumococci using influenza virus co-infected ferrets to recover enough unique transposon inserts from donor and contact ferrets to sufficiently power statistical predictions of the contribution of pneumococcal genes to transmission. These data revealed critical metabolic and regulatory cues that facilitate bacterial transmission as well as validated vaccine antigens designed to specifically inhibit bacterial transmission.

[0117] To enable the most permissive pneumococcal population bottlenecks, both donor and contact ferrets were intranasally infected with A/Sydney/5/97 (H3N2) influenza virus as previously described (McCullers et al. (2010) J Infect Dis 202:1287-1295), a strain and dosage designed for maximal recovery of pneumococcal populations from both donor and recipient animals. Three days following influenza virus challenge, one ferret per cage (donor) was infected with a TnSeq library generated in transmissible serotype 19F strain BHN97. Bacterial burden in donors and cagemates (contacts) was determined by daily induced sneezing and nasal lavage collection. Pneumococcal transmission was rapid and robust (FIG. 1A). Over 80% of contact ferrets were infected within 24 hours, and all contact ferrets were infected by three days post infection with greater than 85% of contact ferrets reaching a bacterial density of greater than 10⁴ CFU/sneeze. Total bacterial populations in nasal discharge were collected daily for four days, and total nasal bacterial population was collected by retrotracheal lavage at the end of the study. Input and total recovered bacterial populations from both donor and contact animals were prepared for Illumina sequencing as previously described (van Opijnen et al. (2015) Curr Protoc Microbiol 36,1E 3:1-24) and mapped to a high-quality closed genome of BHN97 (NCBI Accession No. PRJNA420094). It should be noted that insertion mutants that failed to initially colonize were eliminated from this analysis as the initial colonization event is a prerequisite for subsequent transmission. Comparison of output libraries of unique inserts from donor ferrets to contact ferrets identified a transmission bottleneck where between 5 and 68 percent of inserts in the donor animal are found in the contacts, with between 103-953 unique inserts present in contact ferrets (FIG. 1B). The transmission bottlenecks varied based on donor transposon and bacterial loads (FIGS. 1C and D). Comparison between the co-housed contacts indicated they share approximately 30% of inserts. These data indicate sufficient transmission was occurring for prediction of S. pneumoniae genes that are required for transmission between hosts.

[0118] These data were evaluated to identify insertion mutants that were able to colonize the donor ferrets but were rarely or not recovered from contact ferrets. For each animal, the abundance of each mutant strain was quantified by counting the number of corresponding reads at each transposon insert site per gene obtained by next-generation sequencing. For contact animals, the read counts were dichotomized indicating whether the animal was infected (read count >10) or not infected (read count <10) by each strain. A cutoff of 10 reads was used because OTUs with zero counts in the input had up to 10 counts in the donors. Thus, it was recognized that spurious read counts of up to 10 were possible. 87 factors were identified (Table 1 and FIG. 2), 85% of which are conserved amongst the model strains of pneumococcus TIGR4 and D39, that while able to colonize at least 5 donors to high levels, were absent from all contact animals (Table 1). Using the density of colonization at each gene in the donor, a model was built to predict transmission based on colonization density. The model was used to compare the actual recovery from the contact animals to the modeled predictions to identify an additional 118 genes as significantly reduced (estimated transmission probability <10%) but not absent in recipient animals (Table 2). Many putative transmission factors were found to be involved in metabolism or metabolite transport (FIG. 2), suggesting metabolic sensing is key for transmission. Other classes of genes identified were regulatory, including four two-component systems: ComD (SP_2236), the sensor kinase of the competence cascade, SP_0662 whose cognate response regulator has been suggested to control expression of pilus (Basset et al. (2017) J Bacteriol 199:e00078-17), both SP_2000 and SP_2001, and response regulator SP_0156, which have not been implicated in other cellular processes. Additional transcriptional regulators were identified, many controlling expression of metabolic genes, further supporting a role for metabolic sensing and control during transmission. Three choline binding proteins were identified in the class of factors absent in all contact animals, including a choline binding protein (gene id=peg.403) that is encoded rarely in nasopharyngeal isolates, but is notably absent from laboratory strains TIGR4 and D39. These and other surface exposed factors could serve as adhesins or release factors during inter-host transmission. In addition to gene deletions with defects in transmission, two mutants over-represented in contact animals were identified, being successfully transmitted to 100% of the recipient animals despite not being overrepresented in the donors, suggesting deletion of these factors promote transmission. These factors were a known virulence factor, the pyruvate oxidase spxB (SP_0730) (Echlin et al. (2016) PLoS Pathog. 12(10), e1005951, published online Oct. 21, 2016, DOI: 10.137/journal.ppat.1005951; Pericone et al. (2000) Infect Immun. 68(7):3990-3997; Spellerberg et al. (1996) Mol Microbiol. 19(4):803-813) and its positive regulator, spxR (SP_1038) (Ramos-Montanez et al. (2008) Mol Microbiol 67:729-745).

[0119] To confirm the Tn-seq predictions of gene deletions with altered transmission, targeted mutations in the transmissible strain background were generated and tested in the infant mouse model (Zafar et al. (2016)). Four day old pups were infected in a 1:1 donor to contact ratio and were sampled daily for ten days by taping the nares of the pup on an agar plate to identify bacteria present in the anterior nares. Pups were deemed colonized when bacteria were present on two consecutive sampling days. Confirmation of pneumococci was confirmed by random serotyping of the recovered colonies. Entire nasal passages were collected from donor and contact pups ten days post infection to enumerate colonization burden. The wild type strain, BHN97, is able to transmit in the absence of influenza co-infection, with 75-80% of contact pups becoming colonized within 10 days and 50% colonized by day 5 (FIG. 3A). The AspxB strain is able to transmit to 100% of contact pups, with 50% being colonized on day 2, highlighting a significant enhancement in transmission kinetics (FIG. 3A), even though this mutant is defective in colonization of donor animals (FIG. 3C). Complementation of SpxB resulted in reduction of transmission (FIG. 3B) and enhanced colonization of donor animals compared to the deletion strain (FIG. 3C). Identification of spxB was unexpected, as this virulence factor is best known for its contribution to the production of millimolar quantities of hydrogen peroxide generated by the pneumococcus and it would be expected that the remaining mutants with a functional copy of spxB would rescue the phenotype of the mutant if secreted hydrogen peroxide was the primary factor underlying altered transmissibility. It was hypothesized that additional cellular consequences arising from loss of SpxB activity were responsible for the heightened transmission phenotype.

[0120] Transmission can be contact dependent or airborne, requiring the bacteria to be outside of the host, either briefly as it transmits through the air, or for more prolonged periods of time in the environment. This study showed evidence of airborne transmission, as transposon inserts were present in contacts that were not present in cagemate donor animals, however were present in another donor in the room. However, the relative contributions of airborne versus direct nose-to-nose contact transmission between cagemate ferrets were unable to be determined. S. pneumoniae is capable of survival for prolonged periods in the extracellular environment following dehydration (Walsh and Camilli (2011) MBio 2:e00092-00011). It was hypothesized that both the reduced hydrogen peroxide production and other cellular consequences of glycolytic metabolic alterations by the spxB mutant displaying heightened transmissibility may impart fitness benefits during dehydration stress. Twenty-four hours post desiccation the AspxB strain displayed dramatically increased environmental stability via retention of viability when compared to the parental wild-type (FIG. 3D) with complementation of SpxB partially restoring desiccation sensitivity (FIG. 3E). The fitness benefit of the spxB deletion was independent of capsule type and strain background with similar phenotypes being observed in the serotype 4 TIGR4 and serotype 2 D39 strain backgrounds (FIG. 3D). Tolerance of desiccation stress was not related to metabolically induced alterations in capsule production (Echlin et al. (2016) PLoS Pathog 12:e1005951), as both encapsulated and non-encapsulated TIGR4 spxB mutants displayed similar desiccation stress phenotypes (FIG. 3D). The enzymatic reaction carried out by SpxB requires the glycolytic product pyruvate for its metabolic activity. As such, a similar desiccation tolerant phenotype might be expected to be imparted by nutrient starvation conditions. Upon shifting cultures of S. pneumoniae into media deficient of a carbon source, a significant desiccation tolerance phenotype was conferred to the wild type cultures (FIG. 3F).

[0121] Carbon source limitation is not the only means by which bacterial pathogens are metabolically constrained in the mammalian host. Transition metal bioavailability is also a critical aspect of successful pneumococcal colonization (Turner et al. (2017) Adv Microb Physiol 70:123-191) with both bacterial and host (Palmer et al. (2016) Annu Rev Genet 50:67-91) strategies for metal acquisition and sequestration, respectively. It was hypothesized that metal limitation would impart a similar desiccation tolerance phenotype to S. pneumoniae due to the reduced metabolic activity under such metal starvation conditions. Upon transfer to metal-depleted media conditions, a similar phenotype was observed to that of carbohydrate deprived cells, with a significant increase in desiccation tolerance being observed in cells cultured under metal-limiting conditions compared to cells cultured in standard non-depleted media (FIG. 3G). Taken together these data indicate that nutrient limiting conditions significantly increase the capacity of the pneumococcus to survive desiccation stress and in turn promote both environmental stability and transmissibility of S. pneumoniae.

[0122] To confirm the factors required for transmission identified in the ferret screen, targeted deletions were again made in the transmissible BHN97 strain and transmission dynamics tested in the infant mouse model. Deletion of homolog of putative C3-degrading protease SP_1449 (CppA), iron transporter PiaA (SP_1032 homolog), or competence regulatory histidine kinase ComD (SP_2236 homolog), significantly decreased transmissibility from 75-80% by wild type BHN97 to 50, 45 and 13% respectively (FIG. 4A-C) despite similar colonization burdens in donor pups (FIG. 4D). Complementation of ComD and PiaA by insertion into an inert region of the chromosome, or CppA by overexpression on a plasmid, restored transmission levels to levels statistically indistinguishable from the parental wild-type (FIG. 4A-C). BlpM (SP_0539 homology) and LivG (SP_0752 homolog) were unable to be confirmed in the influenza-naïve pups. This could suggest these factors may only be important for transmission in the context of IAV co-infection in the context of the ferret respiratory tract, or in the context of adult animals, or a combination of such factors. These data generally confirm the Tn-seq predictions of the contribution of pneumococcal genes to mammalian transmission.

[0123] Capsule-based vaccines are extremely effective against invasive pneumococcal disease due to the requirement for capsule during systemic infection. Upon introduction of the conjugate vaccine, pneumococcal populations rapidly undergo a shift towards non-vaccine serotypes that continue to colonize at equivalent rates (Weinberger et al. (2011) Lancet. 378(9807):1962-1973). It was hypothesized that vaccination with antigens based on the pneumococcal factors required for transmission may result in effective inhibition of bacterial spread between hosts and hence represent a novel vaccination strategy for eliminating this opportunistic pathogen from the population. Recombinant forms of the transmission factors PiaA (Brown et al. (2001) Infect Immun. 69(11):6702-6706) and CppA (Carter et al. (2014) Cell Host Microbe. 15(5):587-599), both alone or in combination, were utilized to vaccinate female mice, which were subsequently allowed to breed. Both of these factors are highly conserved, with PiaA being conserved in a majority of available S. pneumoniae genomes, and CppA present in all publicly available pneumococcal genomes. Additionally, these antigens have been shown to be immunogenic in mice and protective against systemic challenge (Carter et al. (2014)). As controls, mice were also vaccinated with either alum control or the currently licensed PCV-13 vaccine. ELISAs and Western Blots indicated that vaccination induced antibody responses against both antigens (FIG. 5). Neonatal mice from these respective litters were utilized in the murine transmission model with half the pups receiving S. pneumoniae and the other half marked as recipient animals. Vaccination with any of these antigens conferred no significant protection benefit during the initial colonization of the donor animals (FIG. 6A). A high degree of protection from pneumococcal transmission was engendered by vaccination with either PiaA (FIG. 6B) or CppA (FIG. 6C), or using both proteins (FIG. 6D), resulting in a significant delay and lower overall rates of transmission due to maternal vaccination. In contrast, no significant protection against transmission was observed in the pups from dams vaccinated with PCV-13 compared to alum controls (FIG. 6E). This was of particular interest as serotype 19F is included in the PCV-13 vaccine, indicating lack of efficacy even in cases of homologous challenge. Maternal vaccination can provide protection both through transplacental antibody trafficking and the presence of maternal antibody in milk. Cross-fostering experiments where pups of vaccinated dams were nursed by non-vaccinated dams, and pups of non-vaccinated dams were nursed by vaccinated dams suggest the protection primarily comes from transplacental antibody (FIG. 6F). Thus, vaccines specifically tailored to target factors involved in pneumococcal transmission may be a vital strategy for elimination of S. pneumoniae from populations in a serotype independent manner.

[0124] These data represent a comprehensive genetic screen to identify bacterial factors required for the mammalian transmission of S. pneumoniae. These data suggest that under conditions of metabolic limitation, the pneumococcus demonstrate heightened environmental stability. This may result in the bacteria becoming increasingly transmissible, a phenotype mimicked via deletion of the pyruvate oxidase SpxB. The advantage for transmissibility of loss of SpxB would suggest that this factor should have been lost to evolution. However, SpxB is also important for colonization, indicating that striking a balance between colonization and transmissibility is vital for pneumococcal biology. This screening methodology allowed for the identification of numerous pneumococcal genes that were required for successful transmission between mammalian hosts. The identification of ComD as a transmission factor complements findings of the importance of pneumococcal competence in colonization (Marks et al. (2010); Shen et al. (2019); Zheng et al. (2017)) in addition to its role in genetic exchange. Three two-component regulatory systems previously not implicated in transmission were also identified, as well as iron acquisition and complement evasion surface proteins. A number of hypothetical proteins of unknown function were also identified, indicating a number of important functional aspects of transmission remain to be characterized. Utilization of the surface exposed transmission factors as vaccine antigens proved extremely efficacious at preventing transmission between donor and contact animals independent of donor colonization burden. Rationally designed combination vaccines could prove to be especially effective at blocking both transmission and invasive disease. These data indicate that vaccines targeting transmission may prove an efficacious strategy for the elimination of S. pneumoniae from populations.

### Materials and Methods

### Ferret Transmission Factors Screen

[0125] Nine week old male castrated ferrets (Triple F Farms) housed three to four per cage were infected intranasally under 4% isoflurane sedation, with 10⁵ TCID₅₀/mL A/Sydney/5/1997 (H3N2) influenza virus in a volume of 1 mL PBS (0.5 mL per nostril) (McCullers et al. (2010) J Infect Dis 202:1287-1295). Three days post viral challenge, one ferret per cage (donor) was infected with 10⁷ CFU BHN97 transposon library, in a volume of 0.6 mL PBS (0.3 mL per nostril). Each day post bacterial infection, 1 mL nasal washes (0.5 mL per nostril of PBS) were collected following ketamine sedation of ferrets from donor and cage mate (contact) ferrets for four days, and additionally at day four, ferrets were euthanized and post terminal retro-tracheal lavage collected in 2 mL PBS. Aliquots were removed for bacterial and viral burden determination, and the remainder was plated on selective media.

### Neonatal Mouse Transmission

[0126] One male and one female adult C57BL/6 mice (Jackson Labs) were housed per cage. Four days after pups were born, all pups (both male and female) were toeclipped for identification, one half of the litter (the donors) was infected intranasally with 2000 CFU BHN97 or mutant strain in 3 μL PBS without sedation. The rest of the litter was designated contacts and was not infected. Each day for 10 days post infection of the donors, the nares of each pup were tapped 20 times on a TSA/blood agar plate supplemented with 20 μg/mL neomycin, and spread with a sterile loop for CFU enumeration. Following two consecutive positive samples, a contact pup was determined to be colonized. On day 10 post infection of donors, all pups were euthanized by CO2 asphyxiation followed by cervical dislocation. Heads were defleshed, bottom jaw and brain removed and entire skull was homogenized with a 5 mL syringe plunger and a 100 μm cell strainer. Sample was collected in 750 μL of PBS, diluted and plated for CFU enumeration.

### Maternal Vaccination

[0127] Adult female C57BL/6 mice (Jackson Labs) were vaccinated by intraperitoneal injection with 1:50 human dose PCV-13 or 10 μg recombinant protein: rCppA or rPiaA (prepared as described below) conjugated to 130 μg alum in a volume of 100 μL PBS two weeks prior to mating and then boosted every two weeks for the duration of the study. Pups were infected with wild type BHN97 and monitored as above. For analysis of circulating antibody response by western and ELISA, two additional adult male mice were vaccinated with each antigen and boosted twice. One week following the final boost, the mice were anesthetized with 4% isoflurane and bled by retro-orbital route and maximum blood volume was collected. Mice were then euthanized by CO2 asphyxiation followed by cervical dislocation.

### Bacterial Growth Conditions

[0128] Streptococcus pneumoniae strains were grown in ThyB or CY (see below) in static conditions at 37° C. +5% CO2 for liquid culture and on TSA/blood agar at 37° C. +5% CO2 for solid culture. TSA/blood agar plates were prepared from 40 mg/L tryptic soy agar (EMD Millipore, GranuCult, item number 105458) in distilled water, and then autoclaved for 45 minutes. After cooling to 55° C., 3% defibrinated sheep blood was added (Lampire biological, item number 7239001) and poured into 100×15 mm round petri dishes. Media was supplemented with 20 μg/mL neomycin for all animal derived samples to reduce contamination with environmental Staphylococci endemic to our animal colonies. Media for Tn-Seq samples were additionally supplemented with 200 μg/mL spectinomycin to select for transposon. Deletion mutants were selected on TSA/blood agar with 1 μg/mL erythromycin. Chromosomal complementation mutants were selected on TSA/blood agar supplemented with 1 μg/mL erythromycin and 150 μg/mL spectinomycin. Plasmid complementation of CppA was selected on TSA/blood agar supplemented with 1 μg/mL erythromycin and 400 μg/mL kanamycin.

[0129] ThyB was prepared from 30 g/L Todd Hewitt (BD item number 249240) with 2 g/L yeast extract (BD item number 212750) in distilled water and autoclaved 45 minutes.

[0130] ThyB metal deplete was made by mixing ThyB with 15 g Chelex resin (BioRad item number 14201253) overnight followed by filtration to remove resin.

[0131] CY media was prepared as follows:

[0132] Supplement: Prepare the supplement “3 in 1” salts by adding 50 g MgCl₂ 6H2O, 0.25 g CalCl2 anhydrous and 0.1 mL (0.1 M) Manganese sulfate 4 H₂O in 500 ml distilled water (dH2O), mix well, and autoclave. Prepare 20% Glucose, 50% Sucrose, 2 mg/ml Adenosine and 2 mg/ml Uridine 500 ml each respectively, and filter sterilize. Combine all 5 components at the following ratio: 60 ml “3 in 1” salts, 120 ml 20% Glucose, 6 ml 50% Sucrose, 120 ml 2 mg/ml Adenosine, 120 ml 2 mg/ml Uridine, mix in a beaker and filter sterilize, label as Supplement, store at 4° C.

[0133] Adams Solutions: Prepare Adams I by combining the following chemicals: 30 mg Nicotinic Acid (Niacin stored at 4° C.), 35 mg Pyridoxine HCl (B6), 120 mg Ca-Pantothenate (stored at 4° C.), 32 mg Thiamine-HCl, 14 mg Riboflavin, and 0.06 ml Biotin (0.5 mg/ml stock). Add dH2O to 200 ml, then add 1-5 drops of 10N NaOH to dissolve chemicals, filter sterilize and store in foiled bottles at 4° C. Prepare Adams II by adding the following chemicals: 50 mg FeSO47H2O, 50 mg CuSO4, 50 mgZnSO47H2O, 20 mg MnCl2 and lml HCl, up to 100 ml dH2O, filter to sterilize, store at 4° C. Prepare Adams III by adding the following 5 components: 800 mg Asparagine, 80 mg Choline Chloride, 64 ml Adams I, 16 ml Adams II and 0.64 ml CaCl2 (1% stock), to 400 ml d H2O. Filter sterilize solutions and store in foiled bottle at 4° C.

[0134] Buffers: Prepare 1M KH2PO4 and 1M K2HPO4 (autoclaved) as the stocks, mix 26.5 ml 1M KH2PO4 and 473 1 M K2HPO4 and stir well, do not titrate, filter to sterilize, 4° C.

[0135] PreC: Prepare PreC by mixing the following chemicals: 4.83 g Sodium Acetate (Anhydrous), 20 g Difco Casamino Acids/technical, 20 mg/L-Tryptophan, and 200 g/L Cysteine HCl, dissolve in 800 d H2O, adjust pH to 7.4-7.6 by adding 10 N NaOH, stir well for 60 minutes, fill up to 4 liter dH2O, mix well, aliquot 400 ml portions in 500 ml flasks, autoclave for 30 minutes, and store at 4° C.

[0136] C+Y: Add 0.5 g glutamine to 500 ml dH2O, filter to sterilize and store at 4° C. Add 2 g pyruvic acid (stored at 4° C.) to 100 ml dH2O, filter to sterilize, and store at 4° C. Solve 5 g yeast to 100 ml dH2O (25 g in 500 ml), and autoclave (filter to sterilize if necessary). Add 6 of the following solutions to 400 ml PreC: 13 ml Supplement, 10 ml Glutamine, 10 ml Adams III, 5 ml Pyruvate, 15 ml K-Phosphate buffer, and 9 ml Yeast. Filter sterilize and store at 4° C. CY sugar deplete media was made as above but with the omission of glucose, sucrose and yeast extract.

### Construction of Mutants in BHN97

[0137] Allelic replacement deletion mutants were made by replacement of the gene of interest with an erythromycin cassette by splicing by overlap extension PCR. A region 1.5-2 kb upstream and downstream of the gene of interest was amplified by PCR using Takara HotStart polymerase according to manufacturer instructions from BHN97 genomic DNA using the primers in Table 3 with an overhang corresponding to the beginning and/or end of the erythromycin cassette. The upstream and downstream fragments were mixed with the erythromycin cassette and amplified with Takara polymerase and upstream forward and downstream reverse primer. The resultant PCR product was gel purified using Qiagen MinElute kit (item number 28606) according to manufacturer's instructions. BHN97 was transformed with the purified PCR product in CY media using both CSP-1 and CSP-2.

[0138] Chromosomal complements were made by insertion of the gene and 150-200 bases upstream containing the promoter, followed by a spectinomycin cassette into a region downstream of amiF similar to as described in (Guiral et al. (2006) Microbiology 152(Pt 2):343-349) except a phage is inserted into the exact chromosomal region described therein in BHN97; therefore, insert regions were changed slightly, as to not disrupt the downstream gene. A region of approximately 1.5 kb downstream of amiF was amplified with primers BHN97 insert UP FWD and BHN97 insert DOWN-Spec (see Table 3) as described above, and then mixed with spectinomycin cassette and amplified. The gene plus upstream primer region was amplified with an overlap of the spectinomycin cassette at the 3′ end and an overlap of the region containing amiF at the 5′ end (see Table 3 for primers). The region containing amiF was amplified with primers BHN97 insert amiF FWD and BHN97 insert amiF REV (see Table 3). All three fragments were mixed and amplified with primers BHN97 insert amiF REV and BHN97 insert UP FWD. The resulting PCR product was gel purified and transformed into the deletion strain as described above. Except for complementation of comD, where due to deletion of comD the strain was no longer competent, and therefore the complementation construct was transformed into BHN97 and then the deletion construct was transformed in to the resultant strain.

[0139] Complementation of cppA transmission phenotype was not able to be accomplished via chromosomal complementation. Therefore an overexpression construct was made in pABG5 (Granok et al. (2000) J Bacteriol. 182(6):1529-1540) by amplification of cppA from the BHN97 genome using primers 5′ BHN97 CppA EcoRI and 3′ BHN97 CppA PstI and digested with EcoRI and PstI (NEB) according to manufacturer's instructions. pABG5 was also digested with EcoRI and PstI. Plasmid and insert were ligated overnight at 14° C. in a thermocycler and transformed into One Shot TOP10 E. coli according to manufacturer's instructions. Transformants were selected on LB agar (BD, BP1425-500) supplemented with 50 μg/mL kanamycin. Following confirmation by Sanger sequencing, the plasmid was transformed into the cppA deletion strain as described above. Maintenance of plasmid was ensured by addition of 400 μg/mL to any broth during culture of this strain. SpxB mutants in strain D39 and TIGR4 were previously constructed (Echlin et al. (2016) PLoS Pathog. 12(10):e1005951).

### Viral Culture

[0140] Influenza virus was grown in the allantoic fluid of 10-11 day embryonated chicken eggs and titered on MDCK (Manin Darby Canine Kidney) cells by infection with 100 μL 10-fold serial dilutions of sample and incubated at 37° C. for 72 hours. Following incubation, viral titers were determined by hemagglutination assay using 0.5% turkey red blood cells and analyzed by the method of Reed and Munch (Reed (1938) The American Journal of Hygiene 27:493-497).

Preparation of BHN97 TnSeq Library TnSeq library was prepared in strain BHN97 as previously described (van Opijnen et al. (2015) Curr Protoc Microbiol. 36:1E 3 1-24). Briefly, in vitro transposition was performed using purified BHN97 genomic DNA, plasmid pMagellan6 as source of transposon and purified MarC9 protein as transposase. DNA was purified by ethanol precipitation. Transposition junctions were repaired with T4 DNA polymerase (NEB) and E. coli DNA ligase (NEB). Ligated product was transformed into strain BHN97 as described above in construction of mutants. Transformations were plated on selective media and grown overnight at 37° C.+5% CO2. All growth was collected into ThyB media, and glycerol was added to a final concentration of 20%, and libraries were stored at −80° C. Six libraries were combined and expanded in 100 mL of ThyB until at midlog growth. Glycerol was added to a final concentration of 20% and 1 mL aliquots frozen for use in all experiments. For each ferret infection, one 1 mL aliquot was added to 9 mL ThyB and grown to midlog (OD₆₀₀=0.4).

### Preparation of Output Libraries

[0141] All of the sneezed material or retrotracheal lavage was plated on 3-5 plates of selective media and grown at 37° C. +5% CO2 overnight. 5 mL PBS was added to each plate and all growth resuspended and collected. Bacteria were pelleted by centrifugation, supernatants discarded and pellets stored at −80° C. Genomic DNA was extracted from bacterial pellets using the Blood and Tissue Kit (Qiagen) according to manufacturer's instructions for Gram-positive bacteria. Tn-Seq libraries were prepared as previously described (van Opijnen et al. (2009) Nat Methods. 6(10):767-772; van Opijnen and Camilli (2010) Curr Protoc Microbiol. Chapter 1, Unit1E 3). Briefly, genomic DNA was digested with MmeI (NEB) and cleaned up via standard phenol chloroform extraction. Then adapters were ligated onto the digested DNA and PCR amplified with Q5 polymerase (NEB). PCR products were gel extracted. Sequencing was performed on Illumina HiSeq platform.

### Desiccation Resistance of Bacterial Hyper-Transmission Mutants

[0142] Bacteria were grown in ThyB to midlog, and 1 mL aliquots transferred to 1.7 mL microcentrifuge tubes and centrifuged to remove all residual media. Tubes were spun open for 90 minutes in a SpeedVac until pellet was dry. Tubes were closed and stored in the dark at room temperature. 24 hours post desiccation, bacterial pellets were resuspended in 100 μL PBS and plated for viability. For desiccation resistance in sugar depleted media, pneumococci were grown in CY until midlog and then shifted to CY or CY lacking glucose, sucrose and yeast extract and allowed to grow for two hours, then desiccation protocol followed. Metal depleted media was made by depletion of ThyB using Chelex resin. Midlog bacteria grown in ThyB were shifted to metal deplete or replete media and exposed for two hours, followed by the desiccation protocol. All were done with at least 4 technical replicates, and three biological replicates. Percent survival was calculated for each technical replicate by dividing the post desiccation CFU/mL with the pre-desiccation CFU/mL of the culture and then multiplied by 100 to give percent survival. Desiccation resistance of the SpxB complemented strain was done using a different vacuum pump and desiccation proceeded more rapidly.

Expression and Purification of rCppA and rPiaA

[0143] Both rCppA and rPiaA were generated by the protein production facility at St. Jude Children's Research Hospital. PiaA was expressed and purified as described in (Carter et al. (2014) Cell Host Microbe. 15(5):587-599). The coding sequence for CppA was amplified from TIGR4 and cloned into the pET28b cloning vector in BL21-DE3 cells. Cultures were grown to OD600=0.5 and induced with 0.07 mM IPTG overnight at 23° C. Bacterial pellets were lysed with Bugbuster (Novogen) reagent according to manufacturer's protocols. CppA was purified on His-Selected Nickel Affinity Gel following manufacturer's protocol for native conditions. Protein was dialyzed using Pierce Slide-A-Lyzer dialysis cassette overnight with sterile PBS. Dialyzed protein was stored at −80° C. in a 10% glycerol solution until further use. PiaA was expressed and purified as previously described (Brown et al. (2001) Infect Immun. 69(11):6702-6706). High-level expression of His₆-PiaA was achieved by the addition of isopropyl-β-d-thiogalactoside (IPTG) to a final concentration of 2 mM, and the cultures were incubated for a further 4 h. The cells were harvested by centrifugation at 6,000×g for 10 min and resuspended in lysis buffer (50 mM sodium phosphate, pH 8.0; 2 M NaCl; 40 mM imidazole). The cells were lysed in a French pressure cell (SLM Aminco, Inc.) at 12,000 lb/in², and the lysates were centrifuged at 100,000×g for 1 h. Then, 20 mM β-mercaptoethanol was added to the resultant supernatants, which were loaded onto 2-ml nickel-nitrilotriacetic acid resin columns (ProBond; Invitrogen) previously equilibrated with five column volumes of lysis buffer. The columns were washed with 10 column volumes of 10 mM sodium phosphate, 20 mM imidazole, and 1 M NaCl (pH 6.0), and the proteins were eluted with a 30-ml gradient of 0 to 500 mM imidazole in 10 mM sodium phosphate (pH 6.0). Fractions of 3 ml were collected and analyzed by SDS-PAGE to identify fractions containing abundant purified protein. The selected fractions were dialyzed extensively against 10 mM sodium phosphate (pH 7.0) to remove the imidazole. The purified His₆-PiaA protein was then resuspended in 50 mM sodium phosphate (pH 7.0), glycerol was added to a final concentration of 50%, and the proteins stored at −15° C. Purity of protein was determined to be >95% by visualization on a 10% Bis-Tris gel stained with Simply Blue Safestain (Invitrogen).

### Fractionation

[0144] Sera from vaccinated animals were analyzed against cell wall and cell membrane fractions from BHN97, ΔCppA, and ΔPiaA.

[0145] Cell wall fraction was prepared by the following methods. A 100 mL culture of each bacteria were grown in ThyB to OD₆₂₀˜0.6. Bacteria were pelleted by centrifugation, washed in 50 mM Tris-HCl, 1 mM EDTA pH 8.0 supplemented with 1×HALT protease inhibitor (Thermo) and pelleted by centrifugation. Pellets were resuspended in 1 mL 50 mM Tris-HCl pH 8.1, 1 mM EDTA pH 8.1 plus 20% (w/v) sucrose, 10 mg/mL chicken egg white lysozyme and 250 U mutanolysin, and incubated 2 hours at 37° C. with shaking. Protoplasts were pelleted at 14,000×g for 10 minutes. Supernatant (cell wall fraction) was removed and stored at −20° C. Membranes were prepared by resuspending protoplasts (pellet from cell wall prep) in 10 mM Tris-HCl pH 8.1, 50 mM MgCl₂ and 10 mM glucose, supplemented with 1×HALT protease inhibitor and lysed with 0.1 mm zirconia/silica beads in a FastPrep 24 system (MP Biologicals) for 3, 20 second pulses with one minute rests on ice between pulses. Beads and intact cells were pelleted at 6000×g for 10 minutes. Supernatant containing membranes was transferred to ultracentrifuge tube and ultra-centrifuged 30 minutes at 45,000×g at 4° C. Supernatant containing cytoplasmic proteins was removed. Pellet was resuspended in 10 mM Tris-HCl pH 8.1, 20 mM MgCl₂ and 50 mM NaCl and ultra-centrifuged 45 minutes at 100,000×g at 4° C. Supernatant was discarded and pellet was resuspended in 100 μL 10 mM Tris-HCl pH 8.1, 20 mM MgCl₂ and 50 mM NaCl.

### Western Blot

[0146] 100 μL sample was combined with 30 μL 4× sample buffer (NuPAGE, Invitrogen) and boiled 10 minutes. 15 μL was loaded into 15 well 4-12% Bis-Tris precast gel, and run 1 hour 45 minutes at 80V in NuPAGE running buffer. Gels were transferred to nitrocellulose membranes at 30V for 90 minutes in NuPAGE transfer buffer supplemented with 20% methanol. Membranes were blocked 1 hour at room temperature in 4% non-fat dry milk in PBS supplemented with 0.1% Tween-20 (PBST). Membranes were incubated with sera from vaccinated mice at a 1:5000 dilution in 4% non-fat dry milk in PBST overnight at 4° C. Blots were washed 3×10 minutes with PBST. Membranes were incubated with secondary antibody, goat anti-mouse IgG-HRP (Invitrogen), 1:5000 in 4% non-fat dry milk in PBST 3 hours at room temperature. Blots were washed 3×10 minutes in PBST and 1×5 minutes in PBS. 2 mL each SuperSignal West Dura Extended Duration Substrate (Thermo Scientific) reagent was added to each blot and incubated for 5 minutes at room temperature. Blots were imaged on a ChemiDoc MP (BioRad) using ImageLab 5.0 software, automatic exposure settings for Chemiluminescence, high specificity, optimizing for bright bands. Purified protein blots were performed as above except 500 ng each protein was used as sample.

### ELISA

[0147] Sera from vaccinated animals were analyzed by ELISA. Bacterial strains BHN97, ΔCppA, and ΔPiaA were grown in CY until midlog. Each well of a 96 well high binding ELISA plate (NUNC #430341) was coated with 10⁶ CFU in carbonate-bicarbonate buffer reconstituted from tablet (Sigma C3041). Bacteria were pelleted to bottom of plate by centrifugation and supernatant removed. Plates were air dried overnight. Plates were blocked in 10% heat inactivated fetal bovine serum (FBS) in PBS for two hours. Serum from vaccinated mice was serially diluted 1:2 starting with a 1:50 dilution in 10% FBS in PBS and added to the wells and incubated for one hour at room temperature. For normalization between strains, polyclonal rabbit sera against LytA (gifted by Elaine Tuomanen, St Jude Children's Research Hospital) was initially diluted 1:300 and subsequently diluted 1:2 in 10% FBS. Plates were washed 5× with tris buffered saline (TBS). Secondary antibody (Southern Biotech #1030-04—anti-mouse & 4030-04—anti-rabbit) was diluted 1:2000 in blocking buffer and incubated 1 hour at room temp. Plates were washed 5 times with TBS. Substrate (Sigma #P7998) was added for 30 minutes and OD₄₀₅ read in 96 well plate reader. Normalization of differential coating by wild type and mutant strains was accomplished by dividing all intensities for each strain by the ratio of the intensity of anti-LytA in wild type versus the mutant strain. Purified protein ELISA was performed as above, except wells were coated with 1200 ng purified protein per well overnight at 4° C. in coating buffer.

### Quantification and Statistical Analysis

[0148] Unless otherwise specified, all statistics were calculated with Graphpad Prism 6. Mantel-Cox log rank test was used for transmission experiments. Mann-Whitney was used to compare bacterial burdens and viability.

[0149] Processing of TnSeq Data and Bottleneck Calculations

[0150] The Illumina sequencing read quality was assessed by FastQC (https://www.bioinformatics.babraham.ac.uk/projects/fastqc/). To remove potential phage phiX contamination, the reads were aligned against the phage phiX genome by Bowtie2 (Langmead and Salzberg (2012) Nat Methods 9:357-359) and the unmapped reads were kept for downstream analyses. The adapters and transposon sequences were removed by Trimmomatic (Bolger et al. (2014) Bioinformatics 30:2114-2120). The cleaned reads were demultiplexed by FastX-Toolkit (http://hannonlab.cshl.edu/fastx toolkit/index.html). The reads for each sample were subsequently aligned against the Streptococcus pneumoniae BHN genome sequence by Bowtie2 (parameters: -1 -p 1 -S -n 0 -e 70 -128 -nomaground -y -k 1 -a -m 1 -best).

[0151] Each sample from each animal was sequenced individually. Then all the samples from each timepoint in a single animal were combined. This gave us the number and location of unique inserts in each animal.

[0152] Bottleneck calculations were determined by dividing the number of unique inserts shared by donor and contact to the number of inserts present in the donor and multiplying by 100 to get a percent. This calculation was done for each cage.

[0153] The number of insertions per gene were enumerated and compared between groups by custom R scripts (available at https://github.com/jiangweiyao/FerretTransmission). That data was then used to build the biostatistics model described below to identify transmission factors.

[0154] Details of Biostatistics Model

[0155] Nine cages were analyzed, with a total of 9 donors and 21 contacts. For each animal, the abundance of each mutant strain was quantified by counting the number of corresponding reads obtained by next-generation sequencing. For donor animals, the infection burden for each strain was defined as log₁₀ (read count+1). For all animals, the read counts were dichotomized to indicate whether the animal was infected (read count >10) or not infected (read count <10) by each strain. Descriptive statistics of infection status of donors and contacts were computed. Also, descriptive statistics of transmission from donor to contact animals were computed in terms of the number of each donor's contacts that became infected. For each donor, the observed transmission rate was computed as the proportion of its contacts that became infected. A final estimate of the probability of transmission was computed as the average of the transmission rates across infected donors. The analyses were performed using version 1.1.13 of the lme4 package for R software (Windows version 3.3.3; www.r-project.org) with script available at https://github.com/jiangweiyao/FerretTransmission.

### Data and Software Availability

[0156] BHN97 genome available at https://www.ncbi.nlm.nih.gov/bioproject/420094. Raw TnSeq output available at: https://www.ncbi.nlm.nih.gov/bioproject/497898. R scripts for analysis available at: https://github.com/jiangweiyao/FerretTransmission.

### Primers

[0157] Primers used in these studies are provided in Table 3.

TABLE 3

| SEQ | | |
|---|---|---|
| ID | Primer | |
| NO: | Name | Primer Sequence |
| 206 | BHN97 | GGAGCTACTAGATCATGAACTC |
| | ComD | |
| | UP | |
| | FWD | |
| 207 | BHN97 | GAGTCGCTTTTGTAAATTTGGAAGTTTTAATTTT |
| | ComD | AGAAGATGTTATTGAACATC |
| | UP | |
| | REV | |
| 208 | BHN97 | GTTTGCTTCTAAGTCTTATTTCCTCTGCTACTCC |
| | ComD | TTTATCTTCTTCTAAAG |
| | DOWN | |
| | FWD | |
| 209 | BHN97 | GATGTTTCATATTTGCCTCCATATG |
| | ComD | |
| | DOWN | |
| | REV | |
| 210 | BHN97 | GCAAGGTATCAATTAGAAAATAGGC |
| | PiaA | |
| | UP | |
| | FWD | |
| 211 | BHN97 | GTTTGCTTCTAAGTCTTATTTCCAAAAACTCCTT |
| | PiaA | AAACATATTTCAAGTC |
| | UP | |
| | REV | |
| 212 | BHN97 | GAGTCGCTTTTGTAAATTTGGTTAGGAAATGCAT |
| | PiaA | GCAAAAATGCG |
| | DOWN | |
| | FWD | |
| 213 | BHN97 | GCTCCAGGAACAGTTTCA C |
| | PiaA | |
| | DOWN | |
| | REV | |
| 214 | BHN97 | GACCAATCAGAGCAAAAATAAGAAGAG |
| | CppA | |
| | UP | |
| | FWD | |
| 215 | BHN97 | GAG TCG CTT TTG TAA ATT TGG ATG |
| | CppA | AAG TGG ACC AAG ATT ATT AAA AAA |
| | UP | ATA G |
| | REV | |
| 216 | BHN97 | GTTTGCTTCTAAGTCTTATTTCCATTCATAAATT |
| | CppA | CCTCCGTCACTTTTTATTTTAAAG |
| | DOWN | |
| | FWD | |
| 217 | BHN97 | GGTGATTTTGTCAAGGAAGGTACG |
| | CppA | |
| | DOWN | |
| | REV | |
| 218 | BHN97 | CGGATTATTCCTACTTTAAAAGC |
| | CppA | |
| | int | |
| | FWD | |
| 219 | BHN97 | CCA CAA TTC AAC ATT ATT TCT ATC |
| | CppA | |
| | int | |
| | REV | |
| 220 | BHN97 | GCGAGCGAGTGAAGCTGG |
| | SpxB | |
| | UP | |
| | FWD | |
| 221 | BHN97 | GTTTGCTTCTAAGTCTTATTTCC-TTACTATTGA |
| | SpxB | GAGGAAGTTAAAAAAATTTGAACC |
| | UP | |
| | REV | |
| 222 | BHN97 | GAGTCGCTTTTGTAAATTTGG-TTCCTCTCGCCG |
| | SpxB | AAAATCAAATATGAAAC |
| | DOWN | |
| | FWD | |
| 223 | BHN97 | CCATAGTCACTATATACGAGAATTTCGC |
| | SpxB | |
| | DOWN | |
| | REV | |
| 224 | BHN97 | CGGTTAGTGTGGGAGCAACG |
| | SpxR | |
| | UP | |
| | FWD | |
| 225 | BHN97 | GTTTGCTTCTAAGTCTTATTTCCTTAGAATTTCC |
| | SpxR | TGATGCTTACTCATTGAAC |
| | UP | |
| | REV | |
| 226 | BHN97 | GAGTCGCTTTTGTAAATTTGGAAACTAGGAGAAA |
| | SpxR | AGATGATAACATTAAAATCAG |
| | DOWN | |
| | FWD | |
| 227 | BHN97 | GAATCTCTACAGGAACAATAGACTGC |
| | SpxR | |
| | DOWN | |
| | REV | |
| 228 | BHN97 | GCAGAATCTCCCAAGGAAAG |
| | insert | |
| | up | |
| | FWD | |
| 229 | BHN97 | GAAAACAATAAACCCTTGCATATGGTGATAGGAT |
| | insert | AGGAAGCATC |
| | up | |
| | REV- | |
| | SPEC | |
| 230 | BHN97 | CACCTTTTTCATCACCTGTC |
| | insert | |
| | amiF | |
| | FWD | |
| 231 | BHN97 | TTTCCCTTGAACTAGTCGAAG |
| | insert | |
| | amiF | |
| | REV | |
| 232 | PiaA | GTATTCACGAACGAAAATCGATTTATTTCGCATT |
| | comp | TTTGCATGCATTTC |
| | fwd | |
| | Spec | |
| 233 | PiaA | GACAGGTGATGAAAAAGGTGAAAACTAGATCCTT |
| | comp | TTTTGAAAAAATTATATTA |
| | rev | |
| | amiF | |
| 234 | ComD | GTATTCACGAACGAAAATCGATTCATTCAAATTT |
| | comp | CCTCTTAAATCTAATG |
| | fwd | |
| | Spec | |
| 235 | ComD | GACAGGTGATGAAAAAGGTGGAAGGAAAAAGACT |
| | comp | TGCAAAATATTC |
| | rev | |
| | amiF | |
| 236 | SpxB | GTATTCACGAACGAAAATCGATTTATTTAATTGC |
| | comp | GCGTGATTGC |
| | fwd | |
| | Spec | |
| 237 | SpxB | GACAGGTGATGAAAAAGGTGGCATAAATATGATA |
| | comp | CAGTGGAATAG |
| | rev | |
| | amiF | |
| 238 | 5′ | NNNNNGAATTCGGAGGAATTTATGAATGTAAATC |
| | BHN97 | AGATTG |
| | CppA | |
| | EcoRI | |
| 239 | 3′ | NNNNNCTGCAGTCATACTTCTTCAAACCACAATT |
| | BHN97 | CAAC |
| | CppA | |
| | PstI | |
| 240 | Erm F | GGAAATAAGACTTAGAAGCAAAC |
| 241 | Erm R | CCAAATTTACAAAAGCGACTC |
| 242 | Spec F | ATCGATTTTCGTTCGTGAATAC |
| 243 | Spec F | CATATGCAAGGGTTTATTGTTTTC |

We claim:

1. A vaccine composition comprising at least one immunogenic polypeptide comprising at least one Streptococcus pneumoniae (S. pneumoniae) protein having an amino acid sequence set forth as any one of SEQ ID NOs: 1-205 or an immunogenic fragment or variant of any thereof, and a non-naturally occurring pharmaceutically acceptable carrier.

2. The vaccine composition of claim 1, wherein said S. pneumoniae protein is naturally expressed on the surface of S. pneumoniae.

3. The vaccine composition of claim 2, wherein said immunogenic polypeptide lacks a transmembrane domain.

4. The vaccine composition of claim 1, wherein said S. pneumoniae protein is naturally expressed on the surface of S. pneumoniae when S. pneumoniae is undergoing autolysis.

5. The vaccine composition of any one of claims 1-4, wherein said S. pneumoniae protein is conserved among two or more sequenced strains of S. pneumoniae.

6. The vaccine composition of claim 1, wherein said S. pneumoniae protein comprises at least one choline binding protein or an immunogenic fragment or variant thereof.

7. The vaccine composition of claim 6, wherein said S. pneumoniae protein comprises at least one choline binding protein having an amino acid sequence selected from the group consisting of SEQ ID NO: 27, 39, and 82; or an immunogenic fragment or variant of any thereof.

8. The vaccine composition of claim 1, wherein said S. pneumoniae protein comprises at least one protein selected from the group consisting of the sensor kinase of the competence cascade (ComD), the homolog of putative C3-degrading protease (CppA), and the iron transporter PiaA, or an immunogenic fragment or variant of any thereof.

9. The vaccine composition of claim 8, wherein said S. pneumoniae protein comprises at least one protein having an amino acid sequence selected from the group consisting of SEQ ID NOs: 10, 44, and 92, or an immunogenic fragment or variant of any thereof.

10. The vaccine composition of claim 8 or 9, wherein said S. pneumoniae protein comprises at least one of CppA and PiaA.

11. The vaccine composition of any one of claims 1-10, wherein said immunogenic polypeptide further comprises an additional pneumococcal immunogen.

12. The vaccine composition of any one of claims 1-10, further comprising an additional pneumococcal immunogen.

13. The vaccine composition of any one of claims 1-12, further comprising an immunological adjuvant.

14. The vaccine composition of any one of claims 1-13, wherein said composition is formulated for intranasal administration.

15. A method for reducing the mammalian transmission of Streptococcus pneumoniae (S. pneumoniae) by administering to a mammalian subject infected with S. pneumoniae or at risk of infection by S. pneumoniae a vaccine composition of any one of claims 1-14.

16. The method of claim 15, wherein said vaccine composition is administered to said mammalian subject intranasally.

17. The method of claim 15 or 16, wherein said method reduces the transmission of S. pneumoniae from a mother to its offspring.

18. A method for reducing the incidence rate of at least one invasive disease caused by Streptococcus pneumoniae (S. pneumoniae) in a mammalian population by administering to at least one mammalian subject within said mammalian population a vaccine composition of any one of claims 1-14.

19. The method of claim 18, wherein said vaccine composition is administered to said mammalian subject intranasally.

20. The method of claim 18 or 19, wherein said method reduces the transmission of S. pneumoniae from a mother to its offspring.

21. The method of any one of claims 18-20, wherein said at least one invasive disease is selected from the group consisting of pneumonia, acute otitis media, sepsis, meningitis, and bacteremia.

22. A method for identifying genetic factors involved in mammalian transmission of Streptococcus pneumoniae (S. pneumoniae), wherein said method comprises infecting an influenza co-infected ferret with a ferret-transmissible strain of S. pneumoniae comprising a gene mutant library, and analyzing members of said gene mutant library that are able to colonize said infected ferret but not able to transmit or had a reduced transmission rate to contact ferrets to identify genetic factors involved in mammalian transmission.

23. The method of claim 22, wherein said gene mutant library comprises a transposon sequencing (Tn-seq) library.

24. The method of claim 22 or 23, wherein said ferret-transmissable strain of S. pneumoniae is administered to said ferret intranasally.

25. The method of any one of claims 22-24, wherein said ferret-transmissible strain of S. pneumoniae comprises serotype 19F strain BHN97.

26. The method of any one of claims 22-25, wherein said influenza co-infected ferret is co-infected with Influenza/A/5/97 (H3N2).

27. The method of any one of claims 22-26, wherein said influenza co-infected ferret is co-infected intranasally with influenza three days prior to infection with said ferret-transmissible strain of S. pneumoniae.

28. The method of any one of claims 22-27, wherein said method further comprises deletion or mutation of said identified genetic factor in a murine-transmissible strain of S. pneumoniae, infection of a mouse with said murine-transmissible strain of S. pneumoniae, and analyzing transmissibility of said murine-transmissible S. pneumoniae to contact mice.

29. A method for reducing the mammalian transmissibility of Streptococcus pneumoniae by reducing the levels or activity of a protein having an amino acid selected from SEQ ID NOs: 1-205.

30. A method for reducing the mammalian transmissibility of Streptococcus pneumoniae by increasing the levels or activity of a protein that decreases tolerance of desiccation stress.

31. The method of claim 30, wherein said protein comprises a spxB protein or a spxR protein.

32. The method of claim 31, wherein said spxB protein comprises the amino acid sequence set forth as SEQ ID NO: 228 or said spxR protein comprises the amino acid sequence set forth as SEQ ID NO: 229.

33. The vaccine composition of any one of claims 1-14 for use as a medicament.

34. The vaccine composition for use according to claim 33, wherein said medicament is used to reduce the transmission of Streptococcus pneumoniae.

35. The vaccine composition of any one of claims 1-14 for use in reducing the transmission of Streptococcus pneumoniae.

The application's sequence listing, which the Patent Office published only in electronic form, follows.

SEQUENCE LISTING (243 sequences)

SEQ ID NO: 1 - protein, 545 aa, Streptococcus pneumoniae
MSIFIGGAWPYANGSLHIGHAAALLPGDILARYYRQKGEEVLYVSGSDCNGTPISIRAKKENKSVKEIADFYHKEFKETFEKLGFTYDLYSRTDSPLHHEIVQELFLQLYEKKFLYTKKIKQLYCTFDNQFLPDRFVEGKCPNCGTHSRGDQCDNCSAILDPIDLVDKRCSICSNEPEVRETEHFYYVFSEFQNLLETYLNDAEETVRWRKNAINLTKRYLREGLPDRAVTRDLPNGIPVPIDGFRDKKIYVWFEAVAGYYTASVDWAQKLQNNITDFWNNRTKSYYVHGKDNIPFHTIIWPAILSGLEIEPLPEYIISSEYLTLENKKISTSNNWAIWLNDIIKKYDADSIRYFLTINAPEMKDANFSWREFIYSHNSELLGSYGNFINRTLKFIEKYFESEIPTKYLEGEILYNLKELYTTVGNLVESGHMKQALEEIFEYIRSANKFYDDMKPWALRESDIEKCKEVLATCVIIILNLGQMLNPFIPFSGKKIEDMFKTKLNTWNYISNLPNKLSDVSMLFDRIDLKKIDEEVLELQQTSSR

SEQ ID NO: 2 - protein, 222 aa, Streptococcus pneumoniae
MEFMLDTLNLDEIKKWSEILPLAGVTSNPTIAKREGSINFFERIKDVRELIGSTPSIHVQVISQDFEGILKDAHEIRRQAGDDIFIKVPVTPAGLRAIKVLKKEGYHITATAIYTVIQGLLAIEAGADYLAPYYNRMENLNIDSNSVIRQLALAIDRQNSPSKILAASFKNVAQVNNALAAGAHAVTAGADVFESAFAMPSIQKAVDDFSDDWFVTQNSRSI

SEQ ID NO: 3 - protein, 222 aa, Streptococcus pneumoniae; identical to SEQ ID NO: 2

SEQ ID NO: 4 - protein, 255 aa, Streptococcus pneumoniae
LNNLTLLKEYNFRDLGNHLTQTGQKIKPKTLFRSSKLFGISKIDVDLLQSYGITKVIDFRSANEIKKAPDPDIKNIKNIVIPIFYNDDSELTEFPIEFFNKSDAGFQHMIKTYDQMINQKQSKLGYKKFFKLLLSHPKDESLLFHCSMGKDRTGIASLFLLYILGVDMNDIFHDYLLSNKYLINVRKENIEYVNNHSGNVILMHNLLSLSSAKEEYINRVLNVLDKEYGGILRYINTELGISSQEIEELKDRYLF

SEQ ID NO: 5 - protein, 104 aa, Streptococcus pneumoniae
MAKAITDATFEQETKDGLVLVDFWATWCGPCRMQGPILDKLSEELSEDVLKIVKMDVDENPNTARAFGIMSIPTLLFKKDGQVVKQVAGVHTAEQIKAIIAELS

SEQ ID NO: 6 - protein, 559 aa, Streptococcus pneumoniae
MKKIKPHGPLPSQTQLAYLGDELAAFIHFGPNTFYDQEWGTGQEDPERFNPSQLDAREWVRVLKETGFKKLILVVKHHDGFVLYPTAHTDYSVKVSPWRRGKGDLLLEVSQAATEFDMDMGVYLSPWDAHSPLYHVDREADYNAYYLAQLKEILSNPNYGNAGKFAEVWMDGARGEGAQKVNYEFEKWFETIRDLQGACLIFSTEGTSIRWIGNERGYAGDPLWQKVNPDKLGTEAELNYLQHGDPSGTIFSIGEADVSIRPGWFYHEDQDPKSLEELVEIYFHSVGRGTPLLLNIPPNQAGLFDAKDIERLYEFATYRNELYKEDLALGAEVSGPALSADFACRHLTDGLETSSWANDAALPIQLELDLGSPKTFDVIELREDLKLGQRIAAFHVQVEVDGVWQEFGSGHTVGYKRLLRGAVVEAQKIRVVITESQVLPLLTKISLYKTPRLSQTVAVQGLAFAEKSLAVAKGETLHFRIERSESSSSLEAKISIQPGTGVHGVAYQDEIYVLAFQAGETEKSLTLPTLYFAGDKTLDFYLNLTVDGQLVDQLQVQVS

SEQ ID NO: 7 - protein, 503 aa, Streptococcus pneumoniae
MSEKAKKGFKMPSSYTVLLIIIAIMAVLTWFIPAGAFIEGIYETQPQNPQGIWDVLMAPIRAMLGTHPEEGSLIKETSAAIDVAFFILMVGGFLGIVNKTGALDVGIASIVKKYKGREKMLILVLMPLFALGGTTYGMGEETMAFYPLLVPVMMAVGFDSLTGVAIILLGSQIGCLASTLNPFATGIASATAGVGTGDGIVLRLIFWVTLTALSTWFVYRYADKIQKDPTKSLVYSTRKEDLKHFNVEESSSVESTLSSKQKSVLFLFVLTFILMVLSFIPWTDLGVTIFDDFNAWLTGLPVIGNIVGSSTSALGTWYFPEGAMLFAFMGILIGVIYGLKEDKIISSFMNGAADLLSVALIVAIARGIQVIMNDGMITDTILNWGKEGLSGLSSQVFIVVTYIFYLPMSFLIPSSSGLASATMGIMAPLGEFVNVRPSLIITAYQSASGVLNLIAPTSGIVMGALALGRINIGTWWKFMGKLVVAIIVVTIALLLLGTFLPFL

SEQ ID NO: 8 - protein, 191 aa, Streptococcus pneumoniae
MYHIKADKRSLASARLISQGLNRLLQAKDFDSITVTDIVNEAGVGRATFYRLFDNVTDVITYSYYIIAHPTLEKIQNKFISNILDFSKSLINDFYSQDSILLISTLLFSVQNGYHFLSMLNLYKNDLLVLLKNEKNLKTKSQDYKYLMEIYLMTLMVTVGSYIQKPEITRELLLEKVSNVWQDLTHLHINN

SEQ ID NO: 9 - protein, 378 aa, Streptococcus pneumoniae
MKHSVHFGAGNIGRGFIGEILFKNGFHIDFVDVNNQIIHALNEKGKYEIEIAQKGQSRIEVTNVAGINSKEHPEQVIEAIQKTDIITTAIGPNILPFIAELLAKGIEARRVAGNTQVLDVMACENMIGGSQFLYQEVKKYLSPEGLTFADNYIGFPNAAVDRIVPAQSHEDSLFVVVEPFNEWVVETKRLKNPDLRLKDVHYEEDLEPFIERKLFSVNSGHATSAYIGAHYGAKTILEALQNPNIKSRIESVLAEIRSLLIAKWNFDKKELENYHKVIIERFENPFIVDEVSRVARTPIRKLGYNERFIRPIRELKELSLSYKNLLKTVGYAFDYRDVNDEESIRLGELLAKQSVKDVVIQVTGLDDQELIEQIVEYI

SEQ ID NO: 10 - protein, 378 aa, Streptococcus pneumoniae; identical to SEQ ID NO: 9

SEQ ID NO: 11 - protein, 489 aa, Streptococcus pneumoniae
MKGLWSNNLTCGYDEKIILENINIKIPEEKISVIIGSNGCGKSTLIKTLSRLIKPLEGEVLLDNKSINSYKEKDLAKHIAILPQSPIIPESITVADLVSRGRFPYRKPFKSLGKDDLEIINRSMVKANVEDLANNLVEELSGGQRQRVWIALALAQDTSILLLDEPTTYLDISYQIELLDLLTDLNQKYKTTICMILHDINLTARYADYLFAIKEGKLVAEGKPEMKGLWSNNLTCGYDEKIILENINIKIPEEKISVIIGSNGCGKSTLIKTLSRLIKPLEGEVLLDNKSINSYKEKDLAKHIAILPQSPIIPESITVADLVSRGRFPYRKPFKSLGKDDLEIINRSMVKANVEDLANNLVEELSGGQRQRVWIALALAQDTSILLLDEPTTYLDISYQIELLDLLTDLNQKYKTTICMILHDINLTARYADYLFAIKEGKLVAEGKPEDILNDKLVKDIFNLEAKIIRDPISNSPLMIPIGKHHVNS

SEQ ID NO: 12 - protein, 528 aa, Streptococcus pneumoniae
MKAFAIYNDYEIVGEYEDAGKSGKSIEGRIQFNRMMEDIKSGKDGVSFVLVFKLSRFARNAADVLSTLQIMQDYGVNLICVEDGIDSSKDAGKLMISVLSAVAEIERENIRIQTMEGCIQKAREGKWNGGFAPYGYKLEDGKLFINEEEAVAIRTIFDQYVNTTIGANGISKYLENHGIRKIPRQNGKNPLFDAGLIRKILKNPVYHGKIAFGRRTLEKVHGTRNEYKQVEQDEYLISEGIHEAIVSDEVWQAAQVKLKSQAKKYEHVNKGKDTRTHLLSGIVKCPICGVGMFGNKCIKKKKDGTKYKDFYYYGCKHRQMIRGHKCTFSKQIREELLDDAVAEVIVKIVSNPKFASMMQEKINMKVDTSEIEKEIDNYQKELRKSHSTKFKLIEEIDNLDVEDKHYKRRKQDLDDRLYRMYDKIDELESSLIDAKAKKQTIEAEKLTGDNIYKVLIYFDKLYKVMNDVERRQLISALISEIQVYEEKQSNGQWLKSITFKLPIIEENLNIDLDNDEQVECVSLLEKRS

SEQ ID NO: 13 - protein, 261 aa, Streptococcus pneumoniae
MKKYQRMHLIFIRQYLKQIMEYKADFLVGVVGVFLTQGLNMLFLNILFQHIPLLDGWSFHQVAFIYGFSLIPKGIDHLFFDNLWALGQHLIRKGEFDKYLTRPISPLFHILVETFQIDALGELLVGVLLLLMTITSLTWTWAKVFLFLISIPFATLIYTSLKIVTASIAFWTKQSGAIIYIFYMFNDFAKYPIAIYHSFLRWLISFIIPFAFTAYYPASYFLKDKDGLFNIGGLILISLIFFTLSLKLWNKGLDAYESAGS

SEQ ID NO: 14 - protein, 272 aa, Streptococcus pneumoniae
MKIVIAPDSFKESLTAQQVAEAIKRGFQQSIADVEYLLCPVGDGGEGTVDAIRHSLDLKEKWIQVTDPFGQKEAMCYFQKGELALFEVADLVGLGKIPLEKRNPLQIQTCGIGELILHLISKGIKDIYIGVGSTASNDGGLGIAAGLGYQFYDRDGNVLPASSQSLLNLASVSTENCYKIPEGVQIHILADVVSPLCGHQGATYTFGNQKGLHPTMFAVVDQAIQDFYEKFSPATLEIKGAGAGGGLAGGLCAFAQASIVSGIDTLLGLNQL

SEQ ID NO: 15 - protein, 1058 aa, Streptococcus pneumoniae
MPKRTDIQKIMVIGSGPIIIGQAAEFDYAGTQACLSLKEEGYEVVLVNSNPATIMTDKEIADKVYIEPITLEFVTRILRKEGPDALLPTLGGQTGLNMAMELSKNGILDELGVELLGTKLSAIDQAEDRDLFKQLMEELEQPIPESEIVNTVEEAVAFAATIGYPVIVRPAFTLGGTGGGMCANEKELREITENGLKLSPVTQCLIERSIAGFKEIEYEVMRDSADNALVVCNMENFDPVGIHTGDSIVFAPAQTMSDYENQMLRDASLSIIRALKIEGGCNVQLALDPNSFKYYVIEVNPRVSRSSALASKATGYPIAKLAAKIAVGLTLDEVINPVTGSTYAMFEPALDYVVAKIPRFPFDKFEKGERRLGTQMKATGEVMAIGRNIEESLLKACRSLEIGVHHNEIPELAAVSDDTLIEKVVKAQDDRLFYVSEAIRRGYTPEEIAELTKIDIFYLDKLLHIFEIEQELGAHPQDLEVLKTAKLNGFSDRKIAELWGTTDDKVRQLRLENKIVPVYKMVDTCAAEFDSETPYFYSTYGWENESIKSDKESVLVLGSGPIRIGQGVEFDYATVHSVKAIQAAGYEAIIMNSNPETVSTDFSVSDKLYFEPLTFEDVMNVIDLEQPKGVIVQFGGQTAINLAEPLAKAGVTILGTQVADLDRAEDRDLFEQALKELDIPQPPGQTATNEEEAALAARKIGFPVLVRPSYVLGGRAMEIVENEEDLRSYMRTAVKASPDHPVLVDSYIVGQECEVDAISDGKNVLIPGIMEHIERAGVHSGDSMAVYPPQTLSQKVQETIADYTKRLAIGLHCLGMMNIQFVIKDEKVYVIEVNPRASRTVPFLSKVTNIPMAQVATKLILGQSLSELGYQNGLYPESTRVHIKAPVFSFTKLAKVDSLLGPEMKSTGEVMGSDATLEKALYKAFEASYLHLPTFGNVVFTIADDAKEEALNLARRFQNIGYGILATEGTAAFFASHGLQAQPVGKIGDDDKDIPSFVRKGRIQAIINTVGTKRTADEDGEQIRRSAIEHGVPLFTALDTANAMLKVLESRSFVTEAI

SEQ ID NO: 16 - protein, 307 aa, Streptococcus pneumoniae
MSENQQALNHVVSMEDLTVDQVMKLIKRGIEFKNGAQLPYEDHPIVSNLFFEDSTRTHKSFEVAEIKLGLERLDFDVKTSSVNKGETLYDTILTLSALGVDVCVIRHPEVDYYRELIASPTITTSIINGGDGSGQHPSQSLLDLMTIYEEFGHFEGLKVAIAGDLDHSRVAKSNMQILKRLGSELFFAGPEEWRSQEFADYGQFVTIDEIIDQVDVMMFLRVQHERHDSGAVFSKEDYHAQHGLTQERYDRLKETAILMHPAPINRDVEIADHLVEAPKSRIVQQMTNGVFVRMAILESVLASRNAN

SEQ ID NO: 17 - protein, 250 aa, Streptococcus pneumoniae
MTIHIIITMLLLLAFLIGSIWFAKKKYQINLAVLGLGAVAFFVSSQILEKLVHILILHPQKDGSIALLQDHPLIYIIYGLAMAAFFEETARLVFFKWLEKKRSLEKADALAYGLGHGGLELIFLGLTSLLNLYIVLSAVQTQNPQVMQLLSENMLKTIQSLSVWQIYLLGFERILALGFQLLLTVWVYQAVRQKKWIYLLAAYGLHAFFDLAPSLFQVGWLTNPVLVEVILALELVLVAYGTKEIFCKKS

SEQ ID NO: 18 - protein, 803 aa, Streptococcus pneumoniae
MIRNKKQDYVLAYKQPASTTYMSWEEEALPIGNGSLGAKVFGLIGAERIQFNEKSLWSGGPLPDSSDYQGGNLQDQYVFLAEIRQALEKRDYNLAKELAEQHLIGPKTSQYGTYLSFGDIHIEFSQQGTTLSQVTDYQRQLNISKALVTTSYVYKGTRFEREAFASFPDDLLVQRFTKEGAETLDFTIELSLTCDLASDEKYEQEKSDYKECKLDITDSHILMKGRVKDNDLRFASYLAWETDGDIRVWSDRVQISGASYANLFLAAKTDFAQNPASNYRKKLDLEQQVIDLVDTAKEKGYTQLKSRHIEDYQALFQRVQLDLEADVDASTTDDLLKNYKPQEGQALEELFFQYGRYLLISSSRDCPDALPANLQGVWNAVDNPPWNSDYHLNVNLQMNYWPAYVTNLLEAVFPVINYVDDLRVYGRLAAVKYAGIVSQKGEENGWLVHTQATPFGWTAPGWDYYWGWSPAANAWMMQTVYEAYSFYRDQDYLREKIYPMLRETVRFWNAFLHKDQQAQRWVSSPSYSPEHGPISIGNTYDQSLIWQLFHDFIQAAQELGLDEDLLTEVKEKSDLLNPLQITQSGRIREWYEEEEQYFQNEKVEAQHRHASHLVGLYSGNLFSYKGQEYIEAARASLNDRGDGGTGWSKANKINLWARLGDGNRAHKLLAEQLKTSTLPNLWCSHPPFQIDGNFGATSGMAEMLLQSHAAYLVPLAALPDAWSTGSVSGLMARGHFEVSMSWEDKKLLQLTILSRSGGDLRVSYPDIEKSVIKMNQEKIKAKCMGKDCISVATAEGDLVQFYF

SEQ ID NO: 19 - protein, 583 aa, Streptococcus pneumoniae
MQNKQEQWAVLKRLMSYLKPYGLLTFLALSFLLATTVIKSVIPLVASHFIDQYLSNLNQLAVTVLLVYYGLYILQTVVQYVGNLLFARVSYSIVRDIRRDAFANMEKLGMSYFDKTPAGSIVSRLTNDTETISDMFSGILSSFISAVFIFLTTLYTMLVLDFRLTALVLLFLPLIFLLVNLYRKKSVKIIEKTRSLLSDINSKLAENIEGIRIIQAFNQEKRLQAEFDEINQEHLVYANRSVALDALFLRPAMSLLKLLGYAVLMAYFGYRGFSIGITVGTMYAFIQYINRLFDPLIEVTQNFSTLQTAMVSAGRVFALIDERTYEPLQENGQAKVQEGNIRFEHVCFSYDGKHPILDDISFSVNKGETIAFVGHTGSGKSSIINVLMRFYEFQSGRVLLDDVDIRDFSQEELRKNIGLVLQEPFLYHGTIKSNIAMYQEISDDQVQAAAAFVDADSFIQELPQGYDSPVSERGSSFSTGQRQLLAFARTVASQPKILILDEATANIDSETESLVQASLAKMRQGRTTIAIAHRLSTIQDANCIYVLDKGRIIESGTHEELLTLGGTYHKMYSLQAGAMAYTL

SEQ ID NO: 20 - protein, 152 aa, Streptococcus pneumoniae
MTPEEMYLTERLDVQIAHFLKKSVQHRRRYKVLKITEIVAGFLIAVFCAIPMPGDRYRLISVALSSLGLLCEGIINLYNAKENWISYQKTAQLLEKEKFLYQCQTEKYAGKTKAFALFVKTCEGLISEEINQWESIQSKEVAASADAPVKKE

SEQ ID NO: 21 - protein, 255 aa, Streptococcus pneumoniae
MSQKLNHLDVGEFVLLLPEHLRSEEEHYKSVFEDDLTSRMSSQDERQQMTATVGYLESGQDRFVYNTTPISYQQFLKDPIIIVITPQSTGPQSILFWIDAVQNYVLFNQLSDAQELIQRQGIENWVSEMQTGYHNYITLLDNIQRERWVMLAGAVLGIATSILLFNTMNRLYFEEFRRAIFIKRIAGLRFLEIHRTYLFAQLGVFLLGFVASVFLQVEVGVAFLVLLLFTGLSLLQLHVQMQKENKMSMLVLKGG

SEQ ID NO: 22 - protein, 316 aa, Streptococcus pneumoniae
MGKKRWARNGSESNDASYAQVVSLYEDTSISVSNNETDKVLAGSLYTDTNEQGLTIPSSLLKNWNEQTGKNLTANDLIGKSVSASIVESAAEASKIAQFQTKIVRVINDEDDMEDSNSFMLSYQMETILKEAGFTKAVSYFILELKDPSQTKVVTEELQKNKKYTVLSQQRVLDIVITFIRVIQGLLIVLSSQAIVVAAVMIGIIIYINIMQRSKEIGVMKAVGYQNRDVKGIFIYEAIWIVGIALLLAFLVAQGVGSLANAIVSHFYPSITKVFELNLLSVLGTLVFALLLGYVSAYFPARKISKMDPVESLRYE

SEQ ID NO: 23 - protein, 282 aa, Streptococcus pneumoniae
MNTNLKPKLQRFASATAFACPICQENLTLLETNFKCCNRHSFDLAKFGYVNLAPQIKQSANYNKENFQNRQQILEAGFYQAILDAVSDLLASSKTTTTILDIGCGEGFYSRKLQESHSEKTFYAFDISKDSVQIAAKSEPNWAVNWFVGDLARLPIKDANMDILLDIFSPANYGEFRRVLSKDGILIKVIPTENHLKEIRQRVQDQLTNKEYSNQDIKEHFQEHFTILSSQTASLTKTITAEQLQALLSMTPLLFHVDQSKIDWSQLTEITIEAEILVGKAF

SEQ ID NO: 24 - protein, 667 aa, Streptococcus pneumoniae
MKPLLETIDTRFGTASKHAFSRGNTLPYTGVPFGMNYFVPQTSDQDGSCFFDPHLPIFQGIRLTHQPSPWIGDYSWLLLTPVTSQLGGDSLFHRQSSYDRDKASFQPHYLKIFSLRYQIETQLTPTCYGASIRLEQKQGKTLSLYLHVADELTVEQVDKRTLALRQEGKTETNKNSLTMFTALQMNTDILAISQEAGDWRIDLASSQTEMQLATSFISPSQALINLPQEDFDSCKASAQADWENLLHRFDIIETGEADRTFFDHCLYRLFLFPQTFYEVDESGQAIHMDLATGTVKPGVLFSNNGFWDTFRTTFPLFALIIPEHYQRFLEGFLNSYRDTGFLPKWLAPDERGMMPGTLLDGIIADSACKDMAPDLEGELFQAMLKTASKADPLGINGRHGLAQYQELGYLSTDHHESVSHTLDYAYSDFCIANCAKKLKNIEIAETYKAASQNYRQLFDAETGYMRARDNQGNFHPDFSPYSWGRDYAECSAIQATLGVLHDIPGLIQLMGGKETFSNYLLKACQDAPLFETTGYGYEIHEMSEMATAPFGQIAISNQPSFHIPYLFRYSDYPDYTALLIKTLRQKAFHPSWEAYPGDEDNGSLSAWYIWSALGFYPTCPGKPSYDLGIPLFDHLRVYLAKENKWLDIHTEQNHSHFNFVKECRLDK

SEQ ID NO: 25 - protein, 409 aa, Streptococcus pneumoniae
MDFFLLVDLILYFLIISHSYRLICKDQINRKELFFFGAYTLLTEIVLDFPFYLLYLDGLGIATFLFPLGLYSYFRWMKQYERDRGLFLSLLLSLLYESTHNFLSVTFSSITGDNFVLQYYGLFFFVVTVLTYFVTLKIIYYFHLELAYFDKDYLYPFLKKVFFALLLLHIVSFVSDMVSTIKHLNSFGSILSSIVFISLLLTFFAMNSHKVQMEKEIALKQKKFEQKHLQNYTDEIVGLYNEIRGFRHDYAGMLVSMQMAIDSGNLQEIDRVYNEVLVKANHKLRSDKYTYFDLNNIEDSALRSLVAQSIVYARNNGVEFTLEVKDTITKLPIELLDLVRIMSVLLNNAVEGSADSYKKQMEVAVIKMETETVIVIQNSCKMTMTPSGDLFALGFSTKGRNRGVGLNNV

SEQ ID NO: 26 - protein, 325 aa, Streptococcus pneumoniae
MKNKRYFFDTILIILLLISTIFCVSPVFIKLDILGTPSHAILTFVLAIPLFYILSQCLHTLLLLVSSIFCKLRPIYFYFIFVIIIGARKYYRILFHQLMGFSPGIAVFYKESQTTKNLFKFYYFLYFTTLISYYFFFTFVYDKPLLLPLISFSIIIALVQKLYRIENQQLFLLKSKVLTILESKKNCEFNLQDYHEIWKLQSKSELPCVALSYISLIKPYLSESVREQIDLLEVKRFKKINHPISLYGMLDVIKLNLYLRHYNEKNKYESMLKKILEVRPDFVLIEQNIDDSLNSSQPLSLSLAISEIQLLLEVYMGIKHVSIRR

SEQ ID NO: 27 - protein, 699 aa, Streptococcus pneumoniae
MNKKKMILTSLASVAILGAGFVTSQPTFVRAEEAPVASQSKAEKDYDAAMKKSEAAKKAYEEAKKKAEDAQKKYDEGQKKTEEKARKAEEASKEIAKATSEVQNAYVKYQRVQRNSRLNEKERKKQLAEIDEEINKAKQILNEKNEDFKKVREEVIPEPTELAKDQRKAEEAKAEEKVAKRKYDYATLKVALAKSKVEAEEAELDNKAENLQNKVADLEKEIANAEKTVADLEKEVAKLEKDVEDFKNSNGEQAEQYLAAAEKDLVAKKAELAEAKIKAATKKAELEKAEAELENLLSTLDPEGKTQDELDKEAAEAELNKKVEALQNQVAELEEELSKLEDNLKDAETNNVEDYIKEGLEEAIATKKAELEKTQKELDAALNELGPDGDEEETPAPAPQPEKPAPAPAPKPEQPAPAPKPEQPAPAPKPEKSADQQAEEDYARRSEEEYNRLTQQQPPKAEKPAPAPAPKPEQPAPAPKTGWKQENGMWYFYNTDGSMATGWLQNNGSWYYLNSNGAMATGWLQYNGSWYYLNANGAMATGWAKVNGSWYYLNANGSMATGWVKDGDTWYYLEASGAMKASQWFKVSDKWYYVNSNGAMATGWLQYNGSWYYLNANGAMATGWAKVNGSWYYLNANGSMATGWVKDGDTWYYLEASGAMKASQWFKVSDKWYYVNGSGSLAVNTTVDGYTVNENGEWV

SEQ ID NO: 28 - protein, 185 aa, Streptococcus pneumoniae
MDKMKPVFQALNKELIQENLTLTIICVGGYVLEYHGLRATQDVDAFYDQNQKINEIIARVGKQFNLNTHEELWLNNHVANMNKQPPLSLCESLYSFENLTVLVVPIEYVLGMKMMSIREQDLKDIGAIIKYKNFHSPFDTFKYLKDMGFDTIDLSVLLEGFSYAYGMDWLEKFFKENQDKLREFY

SEQ ID NO: 29 - protein, 449 aa, Streptococcus pneumoniae
MKIILVGGGKVGFALCRSLVAEKHDVLLIEQDEAVLNHIVSRFDIIGILGNGADFAILEQASVQDCDIFIALTEHDEVNMIAAVLAKKMGAKETIVRVRNPEYSNSYFKEKNILGFSLIVNPELLAARAIANIIDFPNALSVERFAGGRVSLMEFVVKSTSGLCQMPISDFRKKFGNVIVCAIERDHQIIIPSGDMTVQDKDRIFVTGNRVDMILFHNYFKSRAVKSLLIVGAGRIAYYLLGILKDSRIDTKVIEINPEIASFFSEKFPNLYIVQGDGTAKDILLEESAQHYDAVATLTGVDEENLITSMFLDRVGVQKNITKVNRTSLLEIINAPDFSSIITPKSIAVDTIMHFIRGRVNAQYSDLQAMHHLANGQIETLQFHIKEANKMTAKPLSQLKLKKGVLIAAIIRKGKTIFPTGEDMLEVGDKLLVTTLLPNITKIYDLIAR

SEQ ID NO: 30 - protein, 254 aa, Streptococcus pneumoniae
MALLEVKQLTKHFGGLTAVGDVTLELNEGELVGLIGPNGAGKTTLFNLLTGVYEPSEGTVTLDGHLLNGKSPYKIASLGLGRTFQNIRLFKDLTVLDNVLIAFGNHHKQHVFTSFLRLPAFYKSEKELKDKALELLKIFDLDGDAETLAKNLSYGQQRRLEIVRALATEPKILFLDEPAAGMNPQETAELTELIRRIKDEFKITIMLIEHDMNLVMEVTERIYVLEYGRLIAQGTPDEIKTNKRVIEAYLGGEA

SEQ ID NO: 31 - protein, 328 aa, Streptococcus pneumoniae
MMDSPKKLGYHMPAEYEPHHGTLMIWPTRPGSWPFQGKAAKRAFTQIIETIAEGERVYLLVEQAYLSEAQSYLGDKVVYLDIPTNDAWARDTGPTILVNDKGKKLAVDWAFNAWGGTYDGLYQDYEEDDQVASRFAEALERPVYDAKPFVLEGGAIHSDGQGTILVTESCLLSPGRNPNLTKEEIENTLLESLGAEKVIWLPYGIYQDETNEHVDNVAAFVGPAELVLAWTDDENDPQYAMSKADLELLEQETDAKGCHFTIHKLPIPAVRQVVTEEDLPGYIYEEGEEKRYAGERLAASYVNFYIANKAVLVPQFEDVNDQVALDIL

SEQ ID NO: 32 - protein, 746 aa, Streptococcus pneumoniae
MLQWIKNFSIPLIYLSFLLLWLYYAIFSASYLALLGFVFLLVCLFIQFPWKSAGKVLIICGIFGFWFVFQNWQQSQASQNLADSVERVRILPDTIKVNGDSLSFRGKSNGRAFQVYYKLQSEEEKEAFQALTDLHEIGLEGKLSEPEGQRNFGGFNYQAYLKTQGIYQTLNIKTIQSLQKIGSWDIGENLSSLRRKAVVWIKTHFPDPMGNYMTGLLLGHLDTDFEEMNELYSSLGIIHLFALSGMQVGFFMNGFKKLLLRLGLTQEKLKWLTYPFSLIYAGLTGFSASVIRSLLQKLLAQHGVKGLDNFALTVLVLFIVMPNFFLTAGGVLSCAYAFILTMTSKEGEGLKAVTSESLVISLGILPILSFYFAEFQPWSILLTFVFSFLFDLVFLPLLSILFVLSFLYPVIQLNFIFEWLEGIIRLVSQVARRPLVFGQPNAWLLILLLISLALVYDLRKNIKGLTVLSLLITGLFFLTKYPLENEITMLDVGQGESIFLRDVTGKTILIDVGGKAESYKKIKKWQEKMTTSNAQRTLIPYLKSRGVAKIDQLILTNTDKEHVGDLSEMTKAFHVGEILVSKDSLKQKEFVAELQATQTKVRSMIVGENLPIFGSQLEVLSPRKMGDGGHDDTLVLYGKFLDKQFLFTGNLEEKGEKDLLKHYPDLKVNVLKASQHGNKKSSSPAFLEKLKPELTLISVGKSNRMKLPHQETLTRLEGINSKVYRTDQQGAIRFKGLDSWKIESVR

SEQ ID NO: 33 - protein, 166 aa, Streptococcus pneumoniae
MYYKQQISEVMFNLLDSHDTERILWTANEDVQLVKSALAFFFLQKGTPCIYYGTELALTGGPDPDCRRCMPWERVSSDNDMLNFMKRLIKIRKYASVIISHGKYSLQEIKSDLVALEWKYEGRILKVIFNQSTEDYLLEKEAVALASNCQELENQLVISPDGFVIF

SEQ ID NO: 34 - protein, 253 aa, Streptococcus pneumoniae
MEIQDYTDSEFKHALARNLRSLTRGKKSSKQPIAILLGGQSGAGKTTIHRIKQKEFQGNIVIIDGDSFRSQHPHYLELQQEYGKDSVEYTKDFAGKMVESLVTKLSSLRYNLLIEGTLRTVDVPKKTAQLLKNKGYEVQLALIATKPELSYLSTLIRYEELYIINPNQARATPKEHHDFIVNHLVDNTRQLEELAIFERIQIYQRDRSCVYDSKENTTSAADVLQELLFGEWSQVEKEMLQVGEKRLNELLEK

SEQ ID NO: 35 - protein, 186 aa, Streptococcus pneumoniae
MTKLWKRYKPFVSAGIQELITYRVNFFLYRIGDVMGAFVAFYLWKAVFDSSHQSLIQGFTLSDMTLYIIMSFVTNLLTKSDSSFMIGWEVKDGSIIMRLLRPVHFAMSYLFTEIGSRWLVFVSVGLPFVILIAGLKLLSGESFLQIVLITTVYLLSLILAFLINFFSIFALVFQLLCLKTYGDQIF

SEQ ID NO: 36 - protein, 759 aa, Streptococcus pneumoniae
MYNYPMRIHYHRKNGEYDTCSFVKSQDQRIDLLTYKEDYFGALFSFEHPSSHVIESLNFVVHTGQTSKEYSIRFNHYPLLTEVWILEGDDRIYYSENPAIASPFYKNQNPFAFDKAINSASFDHHWGYQGELGCRVEDNQAHFSLWSPTATEVQVVVYESAANDAPVWKTFEMKRGNSYSYNHKENTIGVWSLDVEENLVGKTYQYQVQFPHHQTLTRDPYTIATSPDGKRSAILSHVEKQVENFEVKHGSEATWRLENPCKAVICEMHIRDLTKSPTSGVDEHLRGTFLGAAQAGTVNQYGQSTAFDYIKKLGYNYVQLQPIADRHKEYDEDGNVTYNWGYDPQNYNAPETSFSTNPDDPAQVIRDLKVMVQAYHDAGIGVIMDVVYNHTFSVVDAPFQTTVPDYYYRMNPDGTFQNGTGVGNETASEHEMFRKYMIDSLLYWVQEYNIDGFRFDLMGIHDVKTMQMIRQSLDEIDSNIILYGEGWDMGTGLAPYDKAKKDNAYQMPNIGFFNDNQRDAVKGGEVYGAIKSGFVSGAATEPILAKAILGSRELGSYTHPNQVLNYVEAHDNYNLHDLLATLHPDQSSEQIMRKVETATAMNLLMQGMAFMEIGQEFGRTKLVATGENGELTHDDRERAMNSYNAPDSVNQVNWNLINERQDSIEFIRQVIRLKTKTGAFSYSSYDEIYHHVFVHSAIEHSGCLIYEVHGKEHLLVVVNAKSEPYQFENAGNLAMLVTNSRSKEDNVLNDISLAVLSVL

SEQ ID NO: 37 - protein, 474 aa, Streptococcus pneumoniae
LTRYQNLVNGKWKSSEQEITIYSPINQEELGTVPAMTQTEADEAMQAARAALPAWRALSAVERAAYLHKTAAILERDKEEIGTILAKEVAKGIKAAIGEVVRTADLIRYAAEEGLRITGQAMEGGGFEAASKNKLAVVRREPVGIVLAIAPFNYPVNLSASKIAPALIAGNVVMFKPPTQGSISGLLLAKAFEEAGIPAGVFNTITGRGSEIGDYIIEHKEVNFINFTGSTPIGERIGRLAGMRPIMLELGGKDAALVLEDADLEHAAKQIVAGAFSYSGQRCTAIKRVIVLESVADKLATLLQEEVSKLTVGDPFDNADITPVIDNASADFIWSLIEDAQEKEAQALTPIKREGNLLWPVLFDQVTKDMKVAWEEPFGPVLPIIRVASVEEAIAFANESEFGLQSSVFTNDFKKAFEIAEKLEVGTVHINNKTQRGPDNFPFLGVKGSGAGVQGIKYSIEAMTNVKSIVFDVK

SEQ ID NO: 38 - protein, 591 aa, Streptococcus pneumoniae
LANNRKTETLGVSYLSTFIDKHELLQSYFESNDKTPVWDGEIHVLKSPSEKKDEILGKVPVQIKTTRQKKDVLKSFSLDTRDLELYKPNGGVVLFVVWLNEDNGLRDIYYKSLPPLSIKNLLKKSKLKNKSTNRKKLSIEIFKLDEKKMYPMLVDFINNSQKQYSFINVEGISVEDIPDDKTLKFYFYGQEKEEIFNYQEEHDLFIYYLDPITGIEIPLENTIKIVETEEETDLIIKIGDYVFQDVKRHRFPDGSVQLHFGESFTMSFDIKKKQFKFNYTRPDLLSKAIKCTQVFQELGKIGYFTLNGNKIELDERSIKDISSLDLEADIKGLLKISNFMKKMGIQKDVDLSCFDKQSQRNLNILYSGLVLKKKVALNYNESKLLHLNIANIHIITLYSFLSDKNGTMIDIFTETPWCREGETEDEDYLDISIFEVFEPNDWLKIDNCKIDSVIASYQRLVDNKLKYEGADRTILKIVIAADMAEDKTKRELLLNWAQCLSDWNLKYSKNCEMAIINDLQIKSRVRKLNSKETETLTNILVNSNDNYELCFGSSVLLKSKPQADLFWNKLDNETKERYKDFPIYTLYMKLS

SEQ ID NO: 39 - protein, 406 aa, Streptococcus pneumoniae
MKKILLSTVALLSLVASLLANNPVSAQESSSQATYSKSSGSWIKSGNRWWYKHSDGSYTTNGWEKINGTWYYFDSEGWMKTGWIKEYGKWYYLDDSGAMKTGWCLVSGSWYYLNSSGVMQTGLQTINGKQYYLAAGGAMQTGWHNIGDDTYFFANSGENQNINRRALVLGETSTRAVPIADVNAMEKVFNNQNFSEVVRFPDRTKSEIIAKMQELFESSSEGDVNYLYFTCHGGRDGRIYIGSDGLAFSGWELASVLKQYKGKFVVMLDCCHAGTIISKDNTGEGNEGASTEYFDLDEFVSGFSNMDGNEKSGEMIDSKFLVLCSSRGAEYSSGGSLSLATKYWSLGSGWNPLQNSQAYLAADQNNNRRITLNELYTYSREQVLKQNSNQHIEVYPDNSQFVLFKK

SEQ ID NO: 40 - protein, 228 aa, Streptococcus pneumoniae
METKKIKNLKGQIIVSCQALEGEPLYTPNGGVMPLLAKAAFQAGAKGIRANSVRDISEIKEEVDLPIIGIIKRDYDGFEPFISATMKEIDELVSEGVDILALDCTNRSRPGYDNITDFIHDIKVKYPNQLLMADISTFEEGKVAAESGVDFVGTTLSGYTPYSPKKDNPDFELVERLVKELDVPVIAEGRISTPEQARKMLDLGAYAVVVGGAITRPLEIAKKFIEVV

SEQ ID NO: 41 - protein, 173 aa, Streptococcus pneumoniae
MKFKKIVTSALVVLSLFSIMSPSIASVRVFADDVTTTEVSEISTQEQKQIDDVANVLEQMFRNGVNEKNFTEYVYKNFSQKDIALAENELETNINNPYDRVPWDEMGGCIAGKIRDEFFAMINVSLIVKYAQKKAWSELAKVVLRFVKANGLKTNIYIIAGQLAIWAVQCGLE

SEQ ID NO: 42 - protein, 162 aa, Streptococcus pneumoniae
MKNRFYYYQLLDEREEQLFNKAGSESFYICIALSLLSYIISVLAPSLFNSNMLLIVIIIGTFYFFNRARYLGVTYYSRFHFTILGCFFLTLAITALLMLQNYQFNIEIYQHNPLNFKYLSAWVITYVIYLPWVFIGNLGLKSYGEWAQKKFEQDMDELESGE

SEQ ID NO: 43 - protein, 396 aa, Streptococcus pneumoniae
MTVLKGDNLEILKTIESSSIDLIYMDPPFFTQKTQKLSNNKNIMYSFEDTWTSIEDYKEFLSVRLEECKRVLKNSGSIFVHCDKIANHHIRLILDNIFGADMFQSEIIWNYKRWSNSKKGLLNNHQNIYFYSKSKDFKFNTIFTEYSSTTNIDQILVERKRDGNSKTIYKVDNNGNYILAKEKNGVPLSDVWNIPFLNPKAKERVGYPTQKPILLLEQIIKIATDKNDIVLDPFCGSGTTLVASKILNRNYMGIDLSEEAINITQQRLENVIKTSSNLLNKGIEAYRTKTEEEENILKLLQAKIVQRNKGIDGFLPKHFQKKPIPIKIQKNNECLNESISLLQNAINSKKLDFGVVIKTHSDNLLFDFDTIPENIIVVDHFELTIEKWLSKSQQLL

SEQ ID NO: 44 - protein, 241 aa, Streptococcus pneumoniae
MNVNQIVRIIPTLKANNRKLNETFYIETLGMKALLEESAFLSLGDQTGLEKLVLEEAPSMRTRKVEGRKKLARLIVKVENPLEIEGILSKTDSIHRLYKGQNGYAFEIFSPEDDLILIHAEDDRASLVEVGEKPEFQTDLASISLSKFEISMELHLPTDIESFLESSEIGASLDFIPAQGQDLTVDNTVTWDLSMLKFLVNELDIASLRQKFEFTEYFIPKSEKFFLGKDRNNVELWFEEV

SEQ ID NO: 45 - protein, 408 aa, Streptococcus pneumoniae
MKSNRYIIAFAGVILHLMLGSTYAWSVYRNPIIEKTGWDQASVAFAFSLAIFCLGLSAAFMGRLVEKFGPRVMGSLSAFLYAGGNILTGFAIDRQELWLLYLAYGILGGLGLGAGYITPVSTIIKWFPDKRGLATGLAIMGFGFASLLTSPIAQHLIAGVGLVETFYILGASYFIIMLLASQFIKRPNEQELAILSASGKEKTDSLTQGMTANQALKSNRFYILWIIFFINIACGLGLISAASPMAQEMAGLSTSHAAVMVGVLGIFNGFGRLLWASLSDYIGRPLTFSILLLVNLFFSLSLWLFTDSVLFVVAMSILMTCYGAGFSLIPAYLSDIFGTKELAALHGYILTAWAMAGLAGPILLAETYKMAHSYTQTLFVFLILYSIALALSYYLGRSIKKESQKPLT

SEQ ID NO: 46 - protein, 283 aa, Streptococcus pneumoniae
MDKPDIATIIDSHFEEMTDLEQEIARYFLQAETITDDLSSQQVTQKLHISQAALTRFAKKCGFTGYREFIFQYQHQAENQANQVSKHSPLTKRVLRSYSNMREQTQDLIDEIQLERIAQLIEDAERIYFFGTGSSGLVAREMKLRFMRLGVVCEALTDQDGFAWTTSIMDENCLVLGFSLSGSTPSILDSLLDAKEMGAKTVLFTSVPNKDSQTYTETVLVATHSQPSYIQRISAQLPMLFFIDLIYAYFLEINRESKEKIFNSYWENKKLNGYRRQKRVRKS

SEQ ID NO: 47 - protein, 279 aa, Streptococcus pneumoniae
MQSTEKKPLTAFTVISTIILLLLTVLFIFPFYWILTGAFKSQPDTIVIPPQWFPKMPTMENFQQLMVQNPALQWMWNSVFISLVTMFLVCATSSLAGYVLAKKRFYGQRILFAIFIAAMALPKQVVLVPLVRIVNFMGIHDTLWAVILPLIGWPFGVFLMKQFSENIPTELLESAKIDGCGEIRTFWSVAFPIVKPGFAALAIFTFINTWNDYFMQLVMLTSRNNLTISLGVATMQAEMATNYGLIMAGAALAAVPIVTVFLVFQKSFTQGITMGAVKG

SEQ ID NO: 48 - protein, 367 aa, Streptococcus pneumoniae
MVKYGVVGAGYFGAELARYMQKNDGAEITLLYDPDNAEAIAEELGAKVASSLDELVSSDEVDCVIVATPNNLHKEPVIKAAQHGKNVFCEKPIALSYQDCREMVDACKENNVTFMAGHIMNFFNGVHHAKELINQGVIGDVLYCHTARNGWEEQQPSVSWKKIREKSGGHLYHHIHELDCVQFLMGGMPETVTMTGGNVAHEGEHFGDEDDMIFVNMEFSNKRFALLEWGSAYRWGEHYVLIQGSKGAIRLDLFNCKGTLKLDGQESYFLIHESQEEDDDRTRIYHSTEMDGAIAYGKPGKRTPLWLSSVIDKEMRYLHEIMEGAPVSEEFAKLLTGEAALEAIATADACTQSMFEDRKVKLSEIVK

SEQ ID NO: 49 - protein, 210 aa, Streptococcus pneumoniae
MRLEIINGQKIYGKRPILNQLNLVFQSGKIYGLKGDNGSGKTVLLKILAGYIKLDKGKVLQDGKVYGVKNHYIQDAGILIEKVEFLSHLSLRENLELLRYFSSKVTEKRIAYWIQYYDLQEFEDIEYRHLSLGTKQKMALIQAFISSPSILFLDEPMNALDEKSVRITKQVILSYLKKENGLVILTSHISEDISDLCTDVLVVENGHIQM

SEQ ID NO: 50 - protein, 439 aa, Streptococcus pneumoniae
MGDKKYTVEKANRFIAENKHLVNTQYKPEEHFSAEIGWINDPNGFVYFRGEYHLFYQFYPYDSVWGPMHWGHAKSKDLVTWEHLPVALAPDQDYDRNGCFSGSAIVKDDRLWLMYTGHIEEETGVRQVQNMAFSDDGIHFEKIEQNPVATGSDLPDELIAADFRDPKLFEKDGRYYSVVAAKHKNNVGCIVLLGSDNLVEWQFESIFLKGVEHQGFMWECPDYFELDGKDCLIMSPMRYQREGDSYHNINSSLLFTGKVDWGEKCFIPESVQEIDHGQDFYAPQTLLDDQNRRILIAWMQTWGRTLPTHDQEHKWACAMTLPRILRLEDGKLRQFPVKKGQYQIQIDKDCHYHLGNDIDYLEFGYDSNAQQVYIDRSHLIQKILGEEEQDTSRRYVDIEAKELEVVLDKNSIEIFVNQGEASLTATYYLTVPAELSRID

SEQ ID NO: 51 - protein, 298 aa, Streptococcus pneumoniae
MKRLISANPSEILQMNAEELKQSILASEGRVVLSENVVTRETFVGDITNSEIARAFGADMILLNCVDVFEPKIYALDSSGDDVIHRLHQLVACPIGVNLEPIDPSAKMLEETQEIVAGRVASVETLNRIEELGFDFVCLTGNPGTGVSNQEIIKAVQSAKENFSGLIIAGKMHGAGVNEPVAELSVAEQLLEAGADVILVPAVGTVPAFHDQELREVVDLVHSKGGLVLSAIGTSQETSDTDTIKEIALRNKICGVDIQHIGDAGYGGLATVDNIYALSKAIRGVRHTVSRLARSVNR

SEQ ID NO: 52 - protein, 392 aa, Streptococcus pneumoniae
MTLSKKQLQLRAKILETVYTLGPISRIEIATKTGITPATTSSITNDLIKENILLELGEDEHDTSVGRKKILLDIQAKRFYYIGCELSEKHFTFALGDNLGNILKEEKEIVTKQLIQEKGNQLINQTLKQFLNNCSDYEIEAIGIALPGRYLDNYKITTNNPLWQHIDLEMIQSHFDKPLFFSNNVNCMAIGKRLFSRQQNDPNFAYFHFARGMHCSYIYDGNIYGKGNLMIGEIGHTVVSSEGEECSCGRKGCLQTFAGESWLIKKSKILYHQSPYSLLPSLVKNADDIDIQVILTAYQLGDTGIITLIHQALLYLSQTILNISMMIDSQKIYLHSPLLTNQHIIQKLYSEMNYKPKLLYNRLPEVIIEPYNDFTAAHSAIALCLYHTILHS

SEQ ID NO: 53 - protein, 213 aa, Streptococcus pneumoniae
MLRLYLENEIIELSNNLETIWVSVLDKYEKLFEYLSNEERIELIKEDLIINESVLNVDKKGYELICLQHPVSYDLRRIISVIKISTDIERIGDRIVEILKNLQIIQNNEILKKIISEIKILHEVIGLHMNRAISCYREEQSGCLDMVVIQKQNEIEELSINMEKKIMNYIFEDDGNVSEVISALDIIHHLDKIAHTTQAIYKWIMYRKYGNIN

SEQ ID NO: 54 - protein, 264 aa, Streptococcus pneumoniae
MNVKKIMSIFQSFYVDVSIEELTLTLPISFVKRFEYTQMTFHKESFLLIKEKRRGSLSSFVTQARTMGEKANMDVVLVFSKLSDSEKKQLLQARVPFVDFKGNLFFPPLGLVLNANDTEVPKELTPSEQLTWIAFLLTKGQKVVDVDLLSQVTGLPNSTIYRCLRTFKALYWLNKQNKLYTYTVSKKELFLKSVSCLFNPIKKRILLPDGDIKQIKSVSNLLYGGAYALSHSTFLAETDENISYVIWQRKFNQLSLPLSQHVLK

SEQ ID NO: 55 - protein, 85 aa, Streptococcus pneumoniae
LVAKGSAEIVSIDIGTEEYALYRDLTRNHDNNKIIGKGEAASISLAKKHNGILGSNNLRDVKSYVEEFSLEHMTTGDILIEAFKA

SEQ ID NO: 56 - protein, 299 aa, Streptococcus pneumoniae
MLIGQKIKEIRIEKGISRPDFCGDEQELTVRQLSRIESGASQPSLPKLDYIARRLGVPVYSLMPDFSALPSAYLELKYQILREPIYGKEEEYDKKEACLEEIYKTYFDNLPKEEQLACEVLQACLDTSRTRRPEYAELILEEHMSQIIEKEVYSTNDMLLIRLFFYQMLIRKDLAKFINQIEKLMLFLLEQKKVTQIENYFIIRDTLISGMCCLEKVGVTDCFNDYLSCLQEIMDKTQDYQKKPLVFMFLWKQALRVERDFSLAESFYQSSKTFAKLIGDGFLVKKLTEEWQEDVKKYL

SEQ ID NO: 57 - protein, 363 aa, Streptococcus pneumoniae
MPNVKEITRESWILATFPEWGTWLNEEIEEEVVPEGNFAMWWLGNCGTWIKTPAGANVVMDLWSNRGKSTKKVKDMVRGHQMANMAGVRKLQPNLRVQPMVIDPFAINELDYYLVSHFHSDHIDPYTAAAILNNPKLEHVKFIGPYHCGRIWEGWGVPKERIIVVKPGDTIELKDMKIHAVESFDRTCLVTLPVNGADETGGELAGLAVTDEEMAQKAVNYIFETPGGTIYHGADSHFSNYFAKHGKDFKIDVALNNYGENPVGIQDKMTSIDLLRMAENLRTKVIIPVHYDIWSNFMASTNEILELWKMRKDRLQYDFHPFIWEVGGKYTYPQDQHLVEYHHPRGFDDCFEQDSNIQFKALL

SEQ ID NO: 58 - protein, 225 aa, Streptococcus pneumoniae
MKEIFDRRYPVTSFFLLVTALVFLLMLVTAGGNFDRADTLFRFGAMYGPAIRLFPEQVWRLLSAIFVHIGWEHFIVNMLSLYYLGRQVEEIFGSKQFFFLYLLSGMMGNLFVFVFSPKSLAAGASTSLYGLFAAIIVLRYATRNPYIQQLGQSYLTLFVVNIIGSVLIPGISLAGHIGGAVGGAFLAVIFPVRGEKRMYNTSQRLGAVVLFVGLAILLFYKGMGM

SEQ ID NO: 59 - protein, 328 aa, Streptococcus pneumoniae
MPVTIKDVAKAAGVSPSTVTRVIQNKSTISDETKKRVRKAMKELNYHPNLNARSLVSSYTQVIGLVLPDDSDAFYQNPFFPSVLRGISQVASENHYAIQIATGKDEKERLNAISQMVYGKRVDGLIFLYAQEEDPLVKLVAEEQFPFLILGKSLSPFIPLVDNGNVQAGFDATEYFIKKGCKRIAFIGGSKKLFVTKDRLTGYEQALKHYKLTTDNNRIYFADEFLEEKGYKFSKRLFKHDPQIDAIITTDSLLAEGVCNYIAKHQLDVPVLSFDSVNPKLNLAAYVDINSLELGRVSLETILQIINDNKNNKQICYRQLIAHKIIEK

SEQ ID NO: 60 - protein, 335 aa, Streptococcus pneumoniae
MTEKLINSKPNGVFALILIELTIVLGIFIFIMGVGSENIFGIIIGPLLIVIAGLAHAGLKVVKPQEALVLTLFGNYTGTIKEPGFYFVNPFSVAVNPANHTRLGQSGDVSTKSPFLGAKSSNDNDVNLEIGKKHISLKVMTLSNSRQKINDCLGNPVEIGIAVTWRVVDTAKAVFNVDNYKEYLSLQCDSSLRNIVRIYPYDVSPNVDTTGDGQADEGSLRGSSEIVANRIREEIQSRVEDAGLEILEARITYLAYAPEIAAVMLQRQQASAIIDARKMIVDGAVGMVEMALERLNEGELVELDEERKAAMVSNLLVVLCGNHDAQPIVNTGSLY

SEQ ID NO: 61 - protein, 395 aa, Streptococcus pneumoniae
MIYSKEIVREWLDEVAERAKDHPEWVDVFERCYTDTLDNTVEILEDGSTFVLTGDIPAMWLRDSTAQLRPYLHVAKRDALLRQTIAGLVKRQMTLVLKDPYANSFNIEENWKGHHETDHTDLNGWIWERKYEVDSLCYPLQLSYLLWKETGETSQFDETFVAATKEILHLWTVEQDHKNSPYRFVRDTDRKEDTLVNDGFGPDFAVTGMTWSAFRPSDDCCQYSYLIPSNMFAVVVLGYVQEIFAALNLADSQSVIADAKRLQDEIQEGIKNYAYTTNSKGEKIYAFEVDGLGNASIMDDPNVPSLLAAPYLGYCSVDDEVYQATRRTILSSENPYFYQGEYASGLGSSHTFYRYIWPIALSIQGLTTRDKAEKKFLLDQLVACDGGTGVMHESF

SEQ ID NO: 62 - protein, 409 aa, Streptococcus pneumoniae
MSSHPIQVFSEIGKLKKVMLHRPGKELENLLPDYLERLLFDDIPFLEDAQKEHDAFAQALRDEGIEVLYLEQLAAESLTSPEIRDQFIEEYLDEANIRDRQTKVAIRELLHGIKDNQELVEKTMAGIQKVELPEIPDEAKDLTDLVESDYPFAIDPMPNLYFTRDPFATIGNAVSLNHMFADTRNRETLYGKYIFKYHPIYGGKVDLVYNREEDTRIEGGDELVLSKDVLAVGISQRTDAASIEKLLVNIFKKNVGFKKVLAFEFANNRKFMHLDTVFTMVDYDKFTIHPEIEGDLHVYSVTYENEKLKIVEEKGDLAELLAQNLGVEKVHLIRCGGGNIVAAAREQWNDGSNTLTIAPGVVVVYDRNTVTNKILEEYGLRLIKIRGSELVRGRGGPRCMSMPFEREEV

SEQ ID NO: 63 - protein, 219 aa, Streptococcus pneumoniae
MSKMFKCMCLLVMSVFCMSSISPSLVVFADDSLSANSKVVSGEAQFENGSSVRFGDTQVNILSDEVLEVVNPDGSVDTIERRADGVYINGAFYMAYQKNEIDLNISFRSYDPNVWNYVNTIHGNKQANTFANFMTGAGISYMIGRIGALLGGPWGAIIGGAYFGIQAYQSYLDSQSPYPYYITSTYIHVAQRKWKFITEYYRNSNYTGYVKTVTTYVNF

SEQ ID NO: 64 - protein, 469 aa, Streptococcus pneumoniae
MEKAECGQFSILSFLLQESQTTVKAVMEETGFSKATLTKYVTLLNDKALDSGLELTIHSEDENLRLSIGAATKGRDIRSLFLESAVKYQILVYLFYHQQFLAHQLAQELVISEATLGRHLAGLNQILSEFDLSIQNGRWRGPEHQIRYFYFCLFRKVWSSQEWEGHMQKPERKQEIANLEEICGASLSVGQKLDLVLWAHISQQRLRVNACQFQVIEEKMRGYFDNIFYLRLLRKVPSFFAGQHIPLGVEDGEMMIFFSFLLSHRILPLHTMEYILGFGGQLADLLTQLIQEMKKEELLGDYTEDHVTYELSQLCAQVYLYKGYILQDRYKYQLENRHPYLLMEHDFKETAEEIFHALPAFQQGTDLDKKILWEWLQLIEYMAENGGQHMRIGLDLTSGFLVFSRMAAILKRYLEYNRFITIEAYDPSRHYDLLVTNNPIHKKEQTPVYYLKNDLDMEDLVAIRQLLFT

SEQ ID NO: 65 - protein, 1241 aa, Streptococcus pneumoniae
MDKRIFVEKKADFQVKSESLVRELQHNLGLSSLKSIRIVQVYDVFDLAEDLFAPAEKHIFSEQVTDHVLDEVSVQADLANYAFFAIESLPGQFDQRAASSQEALLLLGSSSDVTVNTAQLYLVNKDIDVTELEAVKNYLLNPVDSRFKDITTGIAKQEFSESDKTIPKLTFFESYTAEDFARYKAEQGMAMEVDDLLFIQDYFKSIGRVPTETELKVLDTYWSDHCRHTTFETELKHIDFSASKFQKQLQSTYDKYIAMREELGRSEKPQTLMDMATIFGRYERANGRLDDMEVSDEINACSVEIEVDVDGVKEPWLLMFKNETHNHPTEIEPFGGAATCIGGAIRDPLSGRSYVYQAMRISGAGDITAPISETRAGKLPQQVISKTAAHGYSSYGNQIGLATTYVREYFHPGFVAKRMELGAVVGAAPKGNVVREKPEAGDVIILLGGKTGRDGVGGATGSSKVQTVESVETAGAEVQKGNAIEERKIQRLFRNGNVTRLIKKSNDFGAGGVCVAIGELADGLEIDLNKVPLKYQGLNGTEIAISESQERMAVVVRPEDVDTFVAECNKENIDAVVVATVTEKPNLVMHWNGETIVDLERRFLDTNGVRVVVDAKVVDKDVKLPEERQTSAETLESDTLTVLSDLNHASQKGLQTIFDCSVGRSTVNHPLGGRYQLTPTEASVQKLPVQHGVTHTASVIAQGFNPYVAEWSPYHGAAYAVIEATARLVAAGANWSKARFSYQEYFERMDKQAERFGQPVAALLGSIEAQIQLGLPSIGGKDSMSGTFEELTVPPTLVAFGVTTADSRKVLSPEFKAVGENIYYIPGQALSAEIDFDLIKKNFAQFEASQADHKVTSASAVKYGGVVESLALATFGNYIGAEVTLPELKTALTAQLGGFVFTSPEEIAGVEKIGQTKADFTLTVNGVKLDGHKLDSAFQGTLEEVYPTEFTQAKELEEVPAVASDVVIKAKEKVEKPVVYIPVFPGTNSEYDSAKAFEKEGAEVNLVPFVTLNEEAIVKSVETMVDNIDKTNILFFAGGFSAADEPDGSAKFIVNILLNEKVRVAIDSFIARGGLIIGICNGFQALVKSGLLPYGNFEDANSTSPTLFYNDANQHVAKMVETRIANTNSPWLAGVQVGDIHAIPVSHGEGKFVVTAEEFAELRDNGQIFSQYVDFNGKPSMDSKYNPNGSVHAIEGITSKNGQIIGKMGHSERYEDGLFQNIPGNKDQHLFASAVKHFTGK

SEQ ID NO: 66 - protein, 480 aa, Streptococcus pneumoniae
MTYEVKSLNEECGVFGIWGHPDAAKLTYFGLHSLQHRGQEGAGILSNDQGQLKRHRDMGLLSEVFRNPANLDKLTGAGAIGHVRYATAGEASVDNIQPFLFRFHDMQFGLAHNGNLTNAASLKKELEQRGAIFSATSDSEILAHLIRRSHNPSLMGKIKEALSLVKGGFAYILLFEDKLIAALDPNGFRPLSIGKMANGAVVVSSETCAFEVIGVEWICDLKPGEIVIIDDEGIQYDSYTDDTQLAICSMEYIYFARPDSNIHGVNVHTARKRMGAQLAREFKHEADIVVGVPNSSLSAAMGFAEESGLPNEMGLIKNQYTQRTFIQPTQELREQGVRMKLSAVSGVVKGKRVVMVDDSIVRGTTSRRIVQLLKEAGATEVHVAIGSPALAYPCFYGIDIQTRQELIAANHTVEETRQIIGADSLTYLSIDGLIESIGIETDAPNGGLCVAYFDGDYPTPLYDYEEDYRRSLEEKTSFYK

SEQ ID NO: 67 - protein, 1009 aa, Streptococcus pneumoniae
MKFNPNQRYTRWSIRRLSVGVASVVVASGFFVLVGQPSSVRADVVNPTPGQVLPEETSGTKEGDLSEKPGDTVLTQAKPEGVTGNTNSLPTPTERTEVSEETNSSSLDTLFEKDEEAQKNPELTDVLKEAVDTDDVDGTQASPAETTPEQVKGGVKENTKDSIDVPAAYLEKAEGKGPFTAGVNQVIPYELFAGDGMLTRLLLKASDNAPWSDNGTAKNPALPPLEGLTKGKYFYEVDLNGNTVGKQGQALIDQLRANGTQTYKATVKVYGNKDGKADLTNLVATKNVDININGLVAKETVEKAVKDNVKDSIDVPAAYLEKAKGEGPFTAGVNHVIPYELFAGDGMLTRLLLKASDKAPWSDNGDAKNPALSPLGENVKTKGQYFYQVALDGNVAGKEKQALIDQFRANGTQTYSATVNVYGNKDGKPDLDNIVATKKVTININGLISKETVQKAVADNVKDSIDVPAAYLEKAKGEGPFTAGVNHVIPYELFAGDGMLTRLLLKASDKAPWSDNGDAKNPALSPLGENVKTKGQYFYQVALDGNVVGKEKQALIDQFRANGTQTYSATVNVYGNKDGKPDLDNIVATKKVTININGLISKETVQKAVADNVKDSIDVPAAYLEKAKGEGPFTAGVNHVIPYELFAGDGMLTRLLLKASDKAPWSDNGDAKNPALSPLGENVKTKGQYFYQVALDGNVVGKEKQALIDQFRANGTQTYSATVNVYGNKDGKPDLDNIVATKKVTININGLISKETVQKAVADNVKDSIDVPAAYLEKAKGEGPFTAGVNHVIPYELFAGDGMLTRLLLKASDKAPWSDNGDAKNPALSPLGENVKTKGQYFYQVALDGNVAGKEKQALIDQFRANGTQTYSATVNVYGNKDGKPDLDNIVATKKVTIKINVKETSDTANGSLSPSNSGSGVTPMNHNHATGTTDSMPADTMTSSTNTMAGENMAASANKMSDTMMSEDKAMLPNTGETQTSMASIGFLGLALAGLLGGLGLKNKKEEN

SEQ ID NO: 68 - protein, 354 aa, Streptococcus pneumoniae
MKQEWFESNDFVKTTSKNKPEEQAQEVADKAEETIADFDTPIEKNTQLEEEVSQAEVELESQQEEKIEAPEDSEARTGIEEKKASNSTEEEPDLSKETEKVTIAEESQEALPQQKATTKEPLLISKSLESPYIPDQAPKSRDKWKEQVLDFWSWLVEAIKSPTSKLETSITHSYTAFLLLILFSASSFFFSIYHIKHAYYGHIASINSRFPEQLAPLTLFSIVSILVATTLFFFSFLLGSFVVRRFIHQEKDWTLDKVLQQYSQLLAIPIFLTAIASFFAFFDSLRFTALLCVISIGIILLASLHIITRPSQASETDSFYQLFLSVLVNGVIILLFFVAEVALIGDYLRILAFL

SEQ ID NO: 69 - protein, 388 aa, Streptococcus pneumoniae
MKKQSLFFVPGIILIGVSLRTPFTVLPIILGNISQGLEVEVSSLGVLTSLPLLMFTLFSPFSTQLAQKIGLEHLFTYSLFFLTIGSLIRLINLPLLYLGTLMVGASVAVINVLLPSLIQANQPKKIGFLTTLYVTSMGIATALASYLAVPITQASSWKGLILLLTLLCLATFLVWLPNHRYNHRLAPQTKQKSQIKVMRNKQVWAIIIFSGFQSLIFYTAMTWLPTMSIHAGLSSHEAGLLTSILSLISIPFSMTIPSLTTSLSTRNRQLMLTLVSLAGVVGISMLFFPINNFIYWLAIHLLIGTATSALFPYLMVNFSLKTSAPEKTAQLSGLSQTGGYILAAFGPTLFGYSFDLFHSWVPSVAALLLIDILMTVALFTVDRADKIL

SEQ ID NO: 70 - protein, 50 aa, Streptococcus pneumoniae
MKIKEQTRKLAAGCSKHCFEVADRTDEVSSKRCFEVVDRTDEVSNIYTAK

SEQ ID NO: 71 - protein, 211 aa, Streptococcus pneumoniae
MFTGIIEEIGKVERIQKDSRNCKLSIKASKILTDIHLGDSIAVNGICLTVTHFNHQSFTVDVMNETWSRTALTLLKHGSEVNLERALSVNGRLGGHVVTGHIDGTGKISSIKKDDNAVWYQINTQKEILDLIVEKGSITIDGISLTVAKVSKVNFSVSVIPHTLEQTILKSKQVGSTVNLENDILGKYVQKLMDNSPKSEISKELLYQNGF

SEQ ID NO: 72 - protein, 326 aa, Streptococcus pneumoniae
MNQDRNKLLSKIAYLYYIENLNQSQIAAKLGIYRTSISRMLTEARNAGIVKIEIENFDTNMFKLENYVKEKYGLESLEIIPNEFDDNPTILSERISQVAAGVLRNLIDDNMKIGFSWGKSLSNLVDLIHSKSVRNVHFYPLAGGPSHIHAKYHVNTLIYEMSRKFHGECTFMNATIVQENKLLADGILQSRYFENLKNSWKDLDIAVVGIGDFSNKGKHQWLDMLTEDDFKELTKVKTVGEICCRFFDSKGKEVYENLQERTIAISLEDLKNIPQSLAVAYGDTKVSSILSVLRANLVNHLITDKNTILKVLEEDGDLTFREILGE

SEQ ID NO: 73 - protein, 387 aa, Streptococcus pneumoniae
MVENVGQLAIEQAKANGGKLEVVSKVTVNNRHDLSIAYSPGVASVSSAIAENADLAYTLTTKKNTVAVVSDGTAVLGLGDIGPAAAMPVMEGKAALFKRFADVDAVPIVLDTKDPEEIIRIVKAMAPTFGGVNLEDISAPRCFEIEQRLIEECDIPIFHDDQHGTAIVVLAGLFNSLKLAQKELDKVKIVVNGGGSAGLSITRKLLAAGATDVTVVDRFGIISEEDHDKLAPHHQDIAKVTNRRLASGSLADALEDADVFLGVSAPGALNPEWIAKMNDKPIIFAMANPTPEIFPDEALAAGAYIVGTGRSDFPNQINNVLAFPGIFRGALDARAKKITVEMQIAAAKGIASLIPDSELSPTNIIPDPFQEGVAKVVAKSVSDAVKD

SEQ ID NO: 74 - protein, 233 aa, Streptococcus pneumoniae
MYPALKKHYGEDQEGFYQALEENCEFYNTNPHFLPFITSLHLVMLENGRPTKETRSIKMALMGPLAGIGDSLSQFCLAPLFSTIAASFAQEGLVVGPILFFLAMNTILTAIKLSTGLYGYKLGTTVIDKLSEQMATISRIANIIGVTVIAGLAATSVKIMVPITFAAGEVKADAKQSIVSIQGMLDKVAPALLPALFTLLVYYLIKEKKWTTYKLVILTVIIGIIGSWLKIIA

SEQ ID NO: 75 - protein, 464 aa, Streptococcus pneumoniae
MSKKRRNRHKKEGQEPQFDFDEAKELTVGQAIRKNEEVEAGVLPEDSILDKYVKQHRDEIEADKFATRQYKKEEFVETQSLDDLIQEMREAVEKSEASSEEVPSSEDILLPLPLDDEEQGLDPLLLDDENPTEMTEEVEEEQNLSRLDQEDSEKKSKKGFILTVLALVSVIICVSAYYVYRQVARSTKEIETSQSTTANQSDVDDFNTLYDAFYTNSNKTALKNSQFDKLSQLKTLLDKLEGSREHTLAKSKYDSLATQIKAIQDVNAQFEKPAIVDGVLDTNAKAKSDAKFTDIKTGNTELDKVLDKAISLGKSQQTSTSSSSSSQTSSSSSSQASSNTTSEPKPSSSNDTRSSRSEVNMGLSSAGVAVQRSASRVAYNQSAIDDSNNSAWDFADGVLEQILATSRSRGYITGDQYILERVNIVNGNGYYNLYKPDGTYLFTLNCKTGYFVGNGAGHADDLDY

SEQ ID NO: 76 - protein, 112 aa, Streptococcus pneumoniae
VTIRTTHTYEYQYSLLFGDAGYLWLLLHLFSISKNQYYLQLANVTAKKLIENYDTLEEIDFALGKSGVLLSLIKYYQFTNDNTLKTFIHNSIWGNLSLFPTKRYSQRKHFRL

SEQ ID NO: 77 - protein, 182 aa, Streptococcus pneumoniae
MEIKFTIKQVVAVGIGAALFVVIGMINIPTPVPNTSIQLQYAVQALLSIIFGPIIGLLVGLIGHAIKDSLAGYGLWWTWIIASGLFGLVVGLFRKYVRVINGVFDWKDILIFNLIQLLANALVWGVLAPLGDVVIYQEAAEKVFAQGIVAGIANGVSVAIAGTLLLLAYAGTQTRAGSLKKD

SEQ ID NO: 78 - protein, 84 aa, Streptococcus pneumoniae
MNTKMMEQFHEMDITMLSSIEGGKNNWQTNVLEGGGAAFGGWGLGTAICAASGVGAPFMGACGYIGAKFGVDLWAGVTGATGGF

SEQ ID NO: 79 - protein, 210 aa, Streptococcus pneumoniae
LLSTGKYIGEGFDLPQLDTLILAAPFSWKNNLIQYSGRIHRNYKDKSLVRIFDYVDIHVPYLEKMFQKRQVAYRKMDYRAIEGEEKQFVYVDSRYEKVLIEDLAGERQECLLILPYVHQTKLMNFLKEFRISQIEICIPETVANKAWLDQLKSQKIKVSFTQSKIVTPILLVNKTIVWYDAMPLLGKVDEMTILRLESASIVSELVAGLR

SEQ ID NO: 80 - protein, 219 aa, Streptococcus pneumoniae
MESILEVLTPDNLVFIFKGFGLTLYISLIAIILSTIIGTVLAVMRNGKNPILRIISSIYIEFVRNVPNLLWIFTIFLVFKMKSTPAGITAFTLFTSAALAEIIRGGLNAVDKGQYEAGMSQGFTSAQILYYIILPQAIRKMLPAIISQFVTVIKDTSLLYSVIALQELFGASQILMGRYFEPEQVFSLYILIALIYFSFNLAISSLSHMLAKRWQQAAE

SEQ ID NO: 81 - protein, 266 aa, Streptococcus pneumoniae
MKKFSLLLAILPFLVACGNQATPKETSAQKTIVLATAGDVPPFDYEDKGNLTGFDIEVLKAVDEKLSDYEIQFQRTAWESIFPGLDSGHYQAAANNLSYTKERAEKYLYSLPISNNPLVLVSNKKNPLTSLDQIAGKTTQEDTGTSNAQFINNWNQKHTDNPATINFSGEDIGKRILDLANGEFDFLVFDKVSVQKIIKDRGLDLSVVDLPSADSPSNYIVFSSDQKEFKEQFDKALKELYQDGTLEKLSNTYLGGSYLPDQSQLQ

SEQ ID NO: 82 - protein, 249 aa, Streptococcus pneumoniae
MNKRLFLKMSLVTLPILALFSQPVLAEENIHFSSCKEAWANGYSDIHEGEPGYSAKLDRDHDGVACELKNAPKGAFKAKQSTVAQTNTSSATTSGWVEQDGAWYYFDENGNPVKNAWQGNYYLKSDGKMAQGEWIYDSSYQAWYYLTSDGSYAYSTWQGNYYLKSDGKMAANEWVDGGRYYVGADGVWKEGQASTASSSNDSNSEYSAALGKAKSYNSLFHMSKKRMYRQLTSDFDKFSNDAAQYAIDH

SEQ ID NO: 83 - protein, 260 aa, Streptococcus pneumoniae
MTSLKLLKEKAPLVICITNDVVKNFTANGLVALGASPAMSEFPADLEDLLKYAGGLLINIGTLTDENWKLYQAALKIAEKYNVPAVLDPVACGAGEYRKKVADDLINNYKLAAIRGNAGEIASLVGIDVASKGVDSAGVDNIDEIALAANEKFNIPIVVTGEVDAIAVNGEVVTIHNGSAMMPKVIGTGCLLGAVVASFIGLEKGQELKSLETAMLVYNIAGEIAEKRPNGHLPGTFKAEFINALYEITDEDVKEFKRVK

SEQ ID NO: 84 - protein, 513 aa, Streptococcus pneumoniae
MSILEVKNLSHGFGDRAIFEDVSFRLLKGEHIGLVGANGEGKSTFMSIVTGKMLPDEGKVEWSKYVTAGYLDQHSVLAERQSVRDVLRTAFDELFKAEARINDLYMKMAEDGADVDALMEEVGELQDRLESRDFYTLDAKIDEVARALGVMDFGMDTDVTSLSGGQRTKVLLAKLLLEKPDILLLDEPTNYLDAEHIDWLKRYLQNYENAFVLISHDIPFLNDVINIVYHVENQQLTRYSGDYYQFQEVYAMKKSQLEAAYERQQKEIADLKDFVARNKARVATRNMAMSRQKKLDKMDIIELQSEKPKPSFDFKPARTPGRFIFQAKNLQIGYDRPLTKPLNLTFERNQKVAIIGANGIGKTTLLKSLLGIISPIAGEVERGDYLELGYFEQEVEGGNRQTPLEAVWNAFPALNQAEVRAALARCGLTTKHIESQIQVLSGGEQAKVRFCLLMNRENNVLVLDEPTNHLDVDAKDELKRALKEYRGSILMVCHEPDFYEGWIDQIWDFNNLT

SEQ ID NO: 85 - protein, 227 aa, Streptococcus pneumoniae
MNFSFLPKYLPYFNYGAVVTILISICVIFLGTILGVVLAFGQRSKFKPLVWLANLYVWIFRGTPMMVQIMIAFALMHINAPTIQIGILGVDFSRLIPGILIISMNSGAYVSETVRAGINAVPKGQLEAAYSLGIRPKNAMRYVILPQAVKNILPALGNEFITIIKDSSLLSAIGVMELWNGATTVSTTTYLPLTPLLFAAFYYLIMTSILTVALKAFEKHMGQGDKK

SEQ ID NO: 86 - protein, 220 aa, Streptococcus pneumoniae
MKLNKYIDHTLLKQDAKKKQIDSLLSEAREYGFASVCVNPTWVEHAKKGLEGTDVKVCTVVGFPLGATTSAVKAFETKEAIQNGADEIDMVINVGALKSGNLALVESDIRAVVEASGDKLVKVIIEACLLTDQEKVVVCQLAQKAGADFVKTSTGFSTGGATIADVTLMRETVGSDMGVKAAGGARSYADALAFVEAGATRIGTSAGVAILKGELADGDY

SEQ ID NO: 87 - protein, 307 aa, Streptococcus pneumoniae
MTELAKQLLELTYIVIGCQFLHTAYCSYKDKTNPVRLGTSAFWTLLSITFIGGSYMPNMSIGIIVILLSLLTLFKQVRIGTLPSLDEMKANIESNRLKNKIFIPVMLMAILALVLAQMIPEFSKISISLAALFATISVLVITNSHPKSLLSENNRMTQQVSTSGIVPQLLGALGAIFTVAGVGDVISHLISGIVPSDSRFIGVLAYVLGMVLFTMIMGNAFAAFTVITAGVGVPFVFALGANPIVAGALAMTAGYCGTLLTPMAANFNALPAALMDMKDQNGVIKAQAGVALVMIVIHIFLMYFLAF

SEQ ID NO: 88 - protein, 519 aa, Streptococcus pneumoniae
MHYEHSRKGNHMIKINHLTITQNKDLRDLVSDLSMTIQDGEKVAIIGEEGNGKSTLLKILMGEALSDFTIKGNIQSDYQSLAYIPQKLPEELKKKTLHDYFFLDSIDLDYSILYRLAEELHFDSNRFASDQKIGNLSGGEALKIQLIHELAKPFEILFLDEPSNDLDLETVDWLKGQIQKTRQTVIFISHDEDFLSETADTIVHLRLVKHRKEAETLVEHLDYDSYSEQRKANFAKQSQQAANNQRAYDKTMEKHRRVKQNVETALRATKDSTAGRLLAKKMKTVLSQEKRYEKTAQSMTQKPLEEEQIQLFFSDIQPLPASKVLVQLEKENLSIDDRVLVQKLQLTVRGQEKIGIIGPNGVGKSTLLAKLKQLLNDKREISLGFMPQDYHKKLQLDLSPIAYISKTGEKEELQKIQSHLASLNFSYPEMQHQIRSLSGGQQGKLLLLDLVLRKPNFLLLDEPTRNFSPTSQPQIRKLFATYPGGLITVSHDRRFLKEICSIIYRMTEHGLKLVNLEDL

SEQ ID NO: 89 - protein, 284 aa, Streptococcus pneumoniae
MENFGAVLKDIRISKNFRLKDLSCNEISESTISRFENGITKLSINHFYILLNRLGISFSEFEELVHCYYSKKECLFEELEHAVNSSDIFLLQELVDKIELKQKQEKSLCNYHIKLIAEQQINRLANLPYNSSKCNELIKYLLSVDTWMEYELKLFYNSVFFMNTRTISLLYRIVIKKTRYFLKTNTGTHRIIPLYLFNLKLLLKNNLLGSAQFFIDDLENLLTRQGYYFEKNYLLFLKGIYLIKTNQIELGKKECSKAMRIFKEYNDSDTINELNQKFKLDLTI

SEQ ID NO: 90 - protein, 338 aa, Streptococcus pneumoniae
MKKKWMYYAACSSNESADDSSSDKGDGGSLVVYSPNSEGLIGATIPAFEEKYGIKIELIQAGTGELFKKLESEKEVPVADVIFGGSYTQYATHGELFENYTSKENDNVIKEYQNTTGYSTPYTLDGSVLIVNPDLTKGMNIEGYNDLLKPELKGKIATADPANSSSAFAQLTNMLQAQGGYKDDKAWSYVKDLFTLIDGKIGSSSSSVYKAVADGEMAVGLSYEDPAVKLLNDGANIKVVYPKEGTVFLPASAAIVKKAKNMENAKKFIDFIISQEVQDTLGTTTTNRPVRKNAKTSENMKPIDKIKTLTEDYDYVIKNKSDIVKKYNEVFTDIQSKQ

SEQ ID NO: 91 - protein, 472 aa, Streptococcus pneumoniae
MDKLFKLKENGTDVRTEVLAGLTTFFAMSYILFVNPQILSQTGMPAQGVFLATIIGAVAGTLMMAFYANLPYAQAPGMGLNAFFTFTVVFGLGYSWQEALAMVFICGIISLVITLTNVRKMIIESIPNALRSAISAGIGVFLAYVGIKNAGLLKFTIDPGNYTVVGEGADKAQATIAANSSAVPGLVSLNNPAVLVALAGLAITIFFVIKGIKGGIILSILTTTVLAIAVGLVDLSSIDFANNHVGAAFEDLKTIFGAALGSEGLGALVSDTARLPETLMAILAFSLTDIFDTIGTLIGTGEKVGIVATNGENHQSAKLDKALYSDLIGTTVGAIAGTSNVTTYVESAAGIGAGGRTGLTALVVAICFAISSFFSPLLAIVPTAATAPILIIVGIMMLGSLKNIHWDDMSEAVPAFFTSIFMGFSYSITQGIAVGFLTYTLTKLVKGQVKDVHAMIWILDALFILNYISMAL

SEQ ID NO: 92 - protein, 563 aa, Streptococcus pneumoniae
MKRSSLLVRMVISIFLVFLILLALVGTFYYQSSSSAIEATIEGNSQTTISQTSHFIQSYIKKLETTSTGLTQQTDVLAYAENPSQDKVEGIRDLFLTILKSDKDLKTVVLVTKSGQVISTDDSVQMKTSSDMMAEDWYQKAIHQGAMPVLTPARKSDSQWVISVTQELVDAKGANLGVLRLDISYETLEAYLNQLQLGQQGFAFIINENHEFVYHPQHTVYSSSSKMEAMKPYIETGQGYTPGHKSYVSQEKIAGTDWTVLGVSSLEKLDQVRSQLLWTLLGASVTSLLVCLCLVWFSLKRWIAPLKDLRETMLEIASGAQNLRAKEVGAYELREVTRQFNAMLDQIDQLMVAIRSQEETTRQYQLQALSSQINPHFLYNTLDTIIWMAEFHDSQRVVQVTKSLATYFRLALNQGKDLICLSDEINHVRQYLFIQKQRYGDKLEYEINENVAFDNLVLPKLVLQPLVENALYHGIKEKEGQGHIKLSVQKQDSGLVIRIEDDGVGFQDAGDSSQSQLKRGGVGLQNVDQRLKLHFGANYQMKIDSRPQKGTKVEIYINRIETS

SEQ ID NO: 93 - protein, 816 aa, Streptococcus pneumoniae
MKINKKYLVGSAAALILSVCSYELGLYQARTVKENNRVSYIDGKQATQKTENLTPDEVSKREGINAEQIVIKITDQGYVTSHGDHYHYYNGKVPYDAIFSEELLMKDPNYKLKDEDIVNEVKGGYVIKVDGKYYVYLKDAAHADNVRTKEEINRQKQEHSQHREGGTPRNDGAVALARSQGRYTTDDGYIFNASDIIEDTGDAYIVPHGDHYHYIPKNELSASELAAAEAFLSGRGNLSNSRTYRRQNSDNTSRTNWVPSVSNPGTTNTNTSNNSNTNSQASQSNDIDSLLKQLYKLPLSQRHVESDGLVFDPAQITSRTARGVAVPHGDHYHFIPYSQMSELEERIARIIPLRYRSNHWVPDSRPEQPSPQPTPEPSPGPQPAPNLKIDSNSSLVSQLVRKVGEGYVFEEKGISRYVFAKDLPSETVKNLESKLSKQESVSHTLTAKKENVAPRDQEFYDKAYNLLTEAHKALFENKGRNSDFQALDKLLERLNDESTNKEKLVDDLLAFLAPITHPERLGKPNSQIEYTEDEVRIAQLADKYTTSDGYIFDEHDIISDEGDAYVTPHMGHSHWIGKDSLSDKEKVAAQAYTKEKGILPPSPDADVKANPTGDSAAAIYNRVKGEKRIPLVRLPYMVEHTVEVKNGNLIIPHKDHYHNIKFAWFDDHTYKAPNGYTLEDLFATIKYYVEHPDERPHSNDGWGNASEHVLGKKDHSEDPNKNFKADEEPVEETPAEPEVPQVETEKVEAQLKEAEVLLAKVTDSSLKANATETLAGLRNNLTLQIMDNNSIMAEAEKLLALLKGSNPSSVSKEKIN

SEQ ID NO: 94 - protein, 285 aa, Streptococcus pneumoniae
MILSKNREDELRKFATNIRLNTLRTLNHLGFGHYGGSLSIVEVLAVLYGEIMPMTPEIFAARDRDYFILSKGHGGPALYSTLYLNGFFDKEFLYSLNTNGTKLPSHPDRNLTPGIDMTTGSLGQGISVATGLAYGQRIRKSPFYTYAIVGDGELNEGQCWEAIQFASHQQLSNLIVFVDDNKKQLDGFTKDICNPGDFVEKFSAFGFESIRVKGSDIREIYEGIVQLKQSNNSSPKCIVLDTIKGQGVQELEEMKSNHHLRPTVEERQMLTSVVERLSQELEETE

SEQ ID NO: 95 - protein, 626 aa, Streptococcus pneumoniae
MVRFIGLSPKQTQAIEVLKGHISLPDVEVAVTQSDQASISIEGEEGHYQLTYRKPHQLYRALSLLVTVLAEADKVEIEEQAAYEDLAYMVDCSRNAVLNVASAKQMIEVLALMGYSTFELYMEDTYQIEGQPYFGYFRGAYSAEELQEIEAYAQQFDMTFVPCIQTLAHLSAFVKWGVKEVQELRDVEDILLIGEEKVYDLIDGMFATLSKLKTRRVNIGMDEAHLVGLGRYLILNGVVDRSLLMCQHLERVLDIADKYGFHCQMWSDMFFKLMSADGQYDRDVEIPEETRVYLDRLKDRVTLVYWDYYQDSEEKYNRNFRNHHKISHDLAFAGGAWKWIGFTPHNHFSRLVAIEANKACRANQIKEVIVTGWGDNGGETAQFSILPSLQIWAELSYRNDLDGLSAHFKTNTGLTVEDFMQIDLANLLPDLPGNLSGINPNRYVFYQDILCPILDQHMTPEQDKPHFAQAAETLANIKEKAGNYAYLFETQAQLNAILSSKVDVGRRIRQAYQADDKESLQQIARQELPELRSQIEDFHALFSHQWLKENKVFGLDTVDIRMGGLLQRIKRAESRIEVYLAGQLDRIDELEVEILPFTDFYADKDFAATTANQWHTIATASTIYTT

SEQ ID NO: 96 - protein, 309 aa, Streptococcus pneumoniae
MKKFSKTLRDNWIFLLMVLPGTLWLILFFYIPVFGNVVAFKDYHMTSNGFIDSIINSKWVGLDNFRFLFSSRDAFIITRNTVLYNLGFIFLGLVVSVGIAIILSELRSKRMVKIFQTSMLFPYFLSWVIISFFTDAFLNIDKGVFNHLLESLGLKEVNFYADLGIWPYLLLFLGIWKGFGYSSVMYYATIMGIDPTYYEAATVDGASKWQRIRNVTIPQLTPLVTVLTILAVGNIFRADFGLFYQIPHNAGQLYNVTNVLDVYVFNGLTQTADIGMAAAAGLYQSVVGLILVILSNLLARRVDPNSALF

SEQ ID NO: 97 - protein, 242 aa, Streptococcus pneumoniae
MKLNKLNFLKENIRNLYSSGVIYLSLLISFIPPILLTFFILKTQGTSLGIKHISNFYAMLGMLMAVIHANRVISRDFSHNTVSLFYNQQKNRMIYVLSNFLYAISVSIIYALNGIVLLVIVSKLGIPGDLGLDFIVAIVVNTILLVLFYFLLSYIFYLYKLKSGLVFGILVALLLFIPNILNTMMMNTSNDLFIKAIELLPFYSLPLFVASNTMSISQYLVLITTIILLYFFTLKKSKKYSF

SEQ ID NO: 98 - protein, 598 aa, Streptococcus pneumoniae
MEQKHRSEFPEKELWDLTALYQDREDFLRAIEKAREDINQFSRDYKGNLHTFEDFEKAFAELEQIYIQMSHIGNYGFMPQTTDYSNDEFANIAQAGMEFETAASVALTFFDDALVVADEEVLDRLGELPHLTAAIRQAKIKKAHYLGADVEKALTNLGEVFYSPQDIYTKMRAGDFEMADFEAHGKTYKNSFVTYENFYQNHEDAEVREKSFRSFSEGLRKHQNTAAAAYLAQVKSEKLLADMKGYDSVFDYLLAEQEVDRVMFDRQIDLIMKDFAPVAQRYLKHVAKVNGLEKMTFADWKLDLDSALNPEVTIDDAYDLVMKSVEPLGQEYCQEVARYQEERWVDFAANSGKDSGGYAADPYRVHPYVLMSWTGRLSDVYTLIHEIGHSGQFIFSDNHQSYFNAHMSTYYVEAPSTLNELLLSDYLENQSNDPRQKRFALAHRLTDTYFHNFITHLLEAAFQRKVYTLIEEGETFGASKLNSIMKEVLTDFWGDAIEIDDDAALTWMRQAHYYMGLYSYTYSAGLVISTAGYLHLKNSGTGAEDWLNLLKSGGSKTPLESAMIIGADISTDKPLRDTIQFLSDTVDQIIAYSAELGE

SEQ ID NO: 99 - protein, 318 aa, Streptococcus pneumoniae
MEINVSKLRTDLPQVGVQPYRQVHAHSTGNPHSTVQNEADYHWRKDPELGFFSHIVGNGCIMQVGPVDNGAWDVGGGWNAETYAAVELIESHSTKEEFMTDYRLYIELLRNLADEAGLPKTLDTGSLAGIKTHEYCTNNQPNNHSDHVDPYPYLAKWGISREQFKHDIENGLTIETGWQKNDTGYWYVHSDGSYPKDKFEKINGTWYYFDSSGYMLADRWRKHTDGNWYWFDNSGEMATGWKKIADKWYYFNEEGAMKTGWVKYKDTWYYLDAKEGAMVSNAFIQSADGTGWYYLKPDGTLADKPEFTVEPDGLITVK

SEQ ID NO: 100 - protein, 313 aa, Streptococcus pneumoniae
MVQEIAQEIIRSARKKGTQDIYFVPKLDAYELHMRVGDERCKIGSYDFEKFAAVISHFKFVAGMNVGEKRRSQLGSCDYAYDQKMASLRLSTVGDYRGHESLVIRLLHDEEQDLHFWFQDIEELGKQYRQRGLYLFAGPVGSGKTTLMHELSKSLFKGQQVMSIEDPVEIKQDDMLQLQLNEAIGLTYENLIKLSLRHRPDLLIIGEIRDSETARAVVRASLTGATVFSTIHAKSIRGVYERLLELGVSEEELAVVLQGVCYQRLIGGGGIVDFASRDYQEHQAAKWNEQIDQLLKDGHITSLQAETEKISYS

SEQ ID NO: 101 - protein, 595 aa, Streptococcus pneumoniae
MTRFEIRDDFYLDGKSFKILSGAIHYFRVPPEDWYHSLYNLKALGFNTVETYVAWNLHEPREGEFHFEGDLDLEKFLQIAQDLGLYAIVRPSPFICAEWEFGGLPAWLLTKNMRIRSSDPAYIEAVGRYYDQLLPRLVPRLLDNGGNILMMQVENEYGSYGEDKAYLRAIRQLMEECGVTCPLFTSDGPWRATLKAGTLIEEDLFVTGNFGSKAPYNFSQMQEFFDEHGKKWPLMCMEFWDGWFNRWKEPIITRDPKELADAVREVLEQGSINLYMFHGGTNFGFMNGCSARGTLDLPQVTSYDYDALLDEEGNPTAKYLAVKKMMATHFSEYPQLEPLYKESMELDAIPLVEKVSLFETLDSLSSPVESLYPQKMEELGQSYGYLLYRTETNWDAEEERLRIIDGRDRAQLYVDGQWVKTQYQTEIGEDIFYQGKKKGLSRLDILIENMGRVNYGHKFLADTQRKGIRTGVCKDLHFLLNWKHYPLPLDNPEKIDFSKGWTQGQPAFYAYDFTVEEPKDTYLDLSEFGKGVAFVNGQNLGRFWNVGPTLSLYIPHSYLKEGANRIIIFETEGQYKEEIHLTRKPTLKHIKGENL

SEQ ID NO: 102 - protein, 141 aa, Streptococcus pneumoniae
MTVVFEFVSEMLKQFVGLDGQGLNQSNIQSTFQEQPLLIAVFACVIGPLVEELFFRQVLLHYLQERLSGLLSIILVGLVFALTHMHSLALSEWIGAVGYLGGGLAFSIIYVKEKENIYYPLLVHMLSNSLSLIILAISIVK

SEQ ID NO: 103 - protein, 163 aa, Streptococcus pneumoniae
MTMPNIIMTRIDERLIHGQGQLWVKYLGCNTVIVANDEVSTDKMQQTLMKTVVPDSVAMRFFPLQKVIDIIHKANPAQTIFIVVKDVKDALTLVEGGVPIKEINIGNIHNATGKEQVTRSIFLGEEDKAALKELSQTHQVTFNTKTTPTGNDGAVQVNIMDYI

SEQ ID NO: 104 - protein, 453 aa, Streptococcus pneumoniae
MNPNLFRSVEFYQRRYHNYATVLIIPLSLLFTFILIFSLVATKEITVTSQGEIAPTSVIASIQSTSDNPILANHLVANQVVEKGDLLIKYSETMEESQKTALETQLQRLEKQKEGLGILKQSLEKATDLFSSEDEFGYHNTFMNFTKQSHDIELGISKTNTEVSNQANLTNSSSSAIEQEITKVQQQIGEYQELRDAIVNKRARLPTGNPHQSILNRYLIASQEQTQGTAEEPFLSQINQSIAGLESSIASLKLQQAGIGSVATYDNSLATKIEVLRTQFLQTASQQQLTVENQLTELKVQLDQATQRLENNTLTAPSKGIVHLNSEFEGKNRIPTGTEIAQIFPIITDTREVLITYYVSSDYLPLLDKGQTVRLKLEKIGNHGTTIIGQLQTIDQTPTRTEQGNLFKLTALAKLSNEDSKLIQYGLQGRVTSVTAKKTYFDYFKDKILTHSD

SEQ ID NO: 105 - protein, 215 aa, Streptococcus pneumoniae
MTLLQLQDVTYRYKNTAEAVLYQIDYNFEPGKFYSIIGESGAGKSTLLSLLAGLDSPVEGSILFQGEDIRKKGYSYHRMHHISLVFQNYNLIDYLSPLENIRLVNKKASKDTLLELGLDESQIKRNVLQLSGGQQQRVAIARSLVSEAPVILADEPTGNLDPKTAGDIVELLKSLAQKTGKCVIVVTHSKEVAQASDITLELKDKKLTETRNTSK

SEQ ID NO: 106 - protein, 267 aa, Streptococcus pneumoniae
MQEFTNPFPIGSSSLIHCMTNEISCEMLANGILALGCKPVMADDPREVLDFTKQSQALFINLGHLSAEKEKAIRMAASYANQSSLPMVVDAVGVTTSSIRKSLVKDLLNYRPTVIKGNMSEIRSLVGLKHHGVGVDASAKDQETEDLLQVLKDWCQTYPGMSFLVTGPKDLIVSKNQVAVLENGCTELDWITGTGDLVGALTAVFLSQGKTGFEASCLAVSYLNIAAEKIVVQGMGLEEFRYQVLNQLSLLRRDENWLDTIKGEAYE

SEQ ID NO: 107 - protein, 462 aa, Streptococcus pneumoniae
MADSFHFSVNIISRGKGKSAVASAAYISGEKIKNEWDGVTHDYTRKEKILVKNIILPDHIPKEFNDRSTLWNKVEMAEKNSNAQLARQFIIGLPKELSLSENKNLVERYIKENLTSQGMIVDYAIHDESQDKNGNIHCHIMTIMRPINEKGEFLAKSKKEYILDEKGEKVLNKNGKPKTRKVELTTWNDTGNVEQWRENFSDLCNKYLERAGAEKRVDHRSFKRQNSDYLPTIHLGSAASAMERKGIETDKGNYNREIRKYNQLVKTIKEEIKTLKGWIGNLLDNLSTAYEKFKDIERDKVIDNPKLFNLTNYLLTYSEIQKEKSKYLKGYAKTNKEKYDFKKLTSAYSYLRKNNIETIGQLQTKIETLKSNSYRLNKKAKTIHKEMEDVEKKILYYEIYKAKKEVYEEYQKKNIFTKEAFYNKHKKDIDQYKVVSGKLKKLLSDKEKLSPKKWNEEKILLM

SEQ ID NO: 108 - protein, 633 aa, Streptococcus pneumoniae
MIILQANKIERSFAGEVLFDNINLQVDERDRIALVGKNGAGKSTLLKILVGEEEPTSGEINKKKDISLSYLAQDSRFESENTIYDEMLHVFDDLRRTDKQLRQMELEMGEKSGEDLDKLMSDYDRLSENFRQAGGFTYEADIRAILNGFKFDESMWQMKIAELSGGQNTRLALAKMLLEKPNLLVLDEPTNHLDIETISWLENYLVNYSGALIIVSHDRYFLDKVATITLDLTKHSLDRYVGNYSRFVELKEQKLATEAKNYEKQQKEIAALEDFVNRNLVRASTTKRAQSRRKQLEKMERLDKPEAGKKAANMTFQSEKTSGNVVLTVENAAVGYDGEVLSQPINLDLRKMNAVAIVGPNGIGKSTFIKSIVDQIPFIKGEKRFGANVEVGYYDQTQSKLTPSNTVLDELWNDFKLTPEVEIRNRLGAFLFSGDDVKKSVGMLSGGEKARLLLAKFSMENNNFLILDEPTNHLDIDSKEVLENALIDFDGTLLFVSHDRYFINRVATHVLELSENGSTLYLGDYDYYVEKKATAEMSQTEEASTSNQAKEASPVNDYQAQKESQKEVRKLMRQIESLEAEIEELESQSQAISEQMLETNDADKLMELQAELDKISHRQEEAMLEWEELSEQV

SEQ ID NO: 109 - protein, 563 aa, Streptococcus pneumoniae
MNKLIAFIEKGKPFFEKLSRNIYLRAIRDGFIAGMPVILFSSIFILIAFVPNSWGFKWSDEVVAFLMKPYSYSMGILALLVAGTTAKSLTDSVNRSMEKTNQINYMSTLLAAIVGLLMLAADPIESGLATGFLGTKGLLSAFLAAFVTVAIYKVCVKNNVTIRMPDEVPPNISQVFKDVIPFTLSVVSLYALDLLARHFVGASVAESIGKFFAPLFSAADGYLGITIIFGAFAFFWFVGIHGPSIVEPAIAAITYANAEVNLNLLQQGMHADKILTSGTQMFIVTMGGTGATLVVPFMFMWLTKSKRNRAIGRASVVPTFFGVNEPILFGAPLVLNPIFFIPFIFVPIANVWIFKFFIETLGMNSFTANLPWTTPAPLGLVLGTNFQVLSFILAALLIVVDVVIYYPFLKVYDEQILEEERSGKSNDELKEKVAANFNTAKADAILEKAGVEAAQNTITKETNVLVLCAGGGTSGLLANALNKAAAEYNVPVKAAAGGYGAHREMLPEFDLVILAPQVASNFEDMKAETDKLGIKLAKTEGAQYIKLTRDGKGALAFVQAQFD

SEQ ID NO: 110 - protein, 479 aa, Streptococcus pneumoniae
LQNLKKYLLLDSGLVVGYTLENAQLKLNKLKKDTENNPLFGEEYFAENPKLWEVRFDNSYPNVIYDKELKLYRCWYQTFVSDEASEETPLAERGEKEYIVKSSRMTALCYAESKDGVKWEKPNLNLVKFKGSKDNNIVLMHAHGAGIMLDEQELDPKKRYKLVSKLEFSPNLHYMVVVFSEDGIHFDEPIPWKKWNPAADSHNFPFRDPKTGKYAVITRTWANNVRLSAITFSDDFINWSEPKEILRGDGFEDQIYSMPVISYADIYLGFASMYHEGDTLNENYDKVDLELKFSANLEQWDSVCKGDYLIERGGGVYPQNADFDASCIFTAAPIIEDDKIWFYYMGGNGNHTGFRESSLARGYIKKDQFAYYTNKREGIPAKISTVSFQTYDDEIYILADIPENGYVKVAVGTKYGNAYSDFGQEDISLVQVSDGKYKLEFNKKSILDLGNSPVAFKFEIENAKLYGIEGSIQQHYLKY

SEQ ID NO: 111 - protein, 467 aa, Streptococcus pneumoniae
MNNDEWVYQYPIGKFVERQGWKIHISSEYNSSHELLQDVAKICHEMRIPFKHLSTEDKFIMRNGKLVSRGFSGKFITCYPNQNELESVLQRLESALKQYNGPYILSDKRWDEAPIYLRYGVFRPSRDDEKKVVIDELIVGDEVVKDERLPVFKIPKGIVPPDFLNKWLDKKDKKQGDFPFIIDNAIRFSNSGGIYNARLKEDGKKIILKEARPYTGLGFDGTYSSERLASECKALKILNEWSEMPKIYWYGKIWEHTFLGIEHMKGVPLNRWVTNNFPLYEVVDKTKDYLLRVSKIVEKLIDLTNKFHSENVYHQDLHLGNILVKDEDEISIIDWEQAVFSNDEKVVHKVAAPGFRAWRETLPSEIDWYGIRQIAHYLYMPLVTTSDLTYNYVSQTRIEGKKLFESLGYTREHIDYVESLLSYLDSKCPQIENISRKKVLKPMHEIRTIESEQDIQDFIIKAFLLVN

SEQ ID NO: 112 - protein, 368 aa, Streptococcus pneumoniae
MNIILIAKLLRENTNTKANALNNGWARSGSEEFKKFSHFVGVDKGIVRTNVLTGKKLSDKIRKEVGSGDSKLGKGGYFSTGDVLLGKDVVSYTVQVFSENNERVGVNTQSHRVQYNLPILADFSVIQDTVEPSRTVVEKIIPKLNIPEEEKGKITEEIKKKKKTSELAELISENVKVRYVDEQGRLLSLKNDTGIGEKESDGTYITNKKQLIGTSYNVTDKKLSSMTTTDGKYYTFKEVDTNSASLTGNIVSEGRTVTLVYRESEAPTTVTVTANYYKEGSQEKLAESVIKADLAIGSEYTTESKTIEGKTTTEDKENRVITRKTTYTLVATPANAYQKTVQQLTITTVRMLRKQWFPKQQPLLRRRL

SEQ ID NO: 113 - protein, 652 aa, Streptococcus pneumoniae
MKKSKSKYLTLAGLVLGTGVLLSACGNSSTASKTYNYVYSSDPSSLNYLAENRAATSDIVANLVDGLLENDQYGNIIPSLAEDWTVSQDGLTYTYKLRKDAKWFTSEGEEYAPVTAQDFVTGLQYAADKKSEALYLVQDSVAGLDDYITGKTSDFSTVGVKALDDQTVQYTLVKPELYWNSKTLATILFPVNADFLKSKGDDFGKADPSSILYNGPFLMKALVSKSAIEYKKNPNYWDAKNVFVDDVKLTYYDGSDQESLERNFTAGAYTTARLFPNSSSYEGIKEKYKNNIIYSMQNSTSYFFNFNLDRKSYNYTSKTSDIEKKSTQEAVLNKNFRQAINFAFDRTSYGAQSEGKEGATKILRNLVVPPNFVSIKGKDFGEVVASKMVNYGKEWQGINFADGQDPYYNPEKAKAKFAEAKKELEAKGVQFPIHLDKTVEVTDKVGIQGVSSIKQSIESVLGSDNVVIDIQQLTSDEFDSSGYFAQTAAQKDYDLYHGGWGPDYQDPSTYLDIFNTNSGGVLQNLGLEPGEANDKAKAVGLDVYTQMLEEANKEQDPAKRYEKYADIQAWLIDSSLVLPSVSRGGTPSLRRTVPFAAAYGLTGTKGVESYKYLKVQDKIVTTDEYAKAREKWLKEKEESNKKAQEELAKHVK

SEQ ID NO: 114 - protein, 330 aa, Streptococcus pneumoniae
MDLLEKECLKCDKNFQQGDIWNYYYLSDKMPAQGWKIHISSQIKDAVNIFKIVYKLSQLNNCSFKVVKNLEELKKINSPREMSPTANKFITLYPKSESKAKSMICNLTNRLSEFKAPKILSDYQCGMHSPVHYRYGAFLKKQAYDEKNKKVIYLLLDEKRKNYVEDKRQNFPSLPSWKMDLFSEEEKRIYFQTTCEVSSKDSAINKYKMEKIIKRSNKGNVYRAIRKSDGQKVIIKQSRPFVNYDAEGEWTALDDIKNEAHMLKKLADKSYTTNLTDEFYIVDDYFLVQEQVDGLNFEEFIRETEHSLNIREKTLDNIVNIVSYIHKLGI

SEQ ID NO: 115 - protein, 423 aa, Streptococcus pneumoniae
MPDNLALRMRPKTIDQVIGQEHLVGPGKIIRRMVEANRLSSMILYGPPGIGKTSIASAIAGTTKYAFRTFNATVDSKKRLQEISEEAKFSGGLVLLLDEIHRLDKTKQDFLLPLLESGLVIMIGATTENPFFSVTPAIRSRVQIFELEPLSNQDVKEALQIALSNPERGFDFPIELDEDALDFIATSTNGDLRSAFNSLDLAVLSTPENDEGIRHITLDIMENSLQRSYITMDKDGDGHYDVLSALQKSIRGSDVDASLHYTARLIEAGDLPSLARRLTVIAYEDIGLANPEAQIHTVTALDAAQKIGFPEARILIANVVIDLALSPKSNSAYVAMDKALADLKTSGHLPIPRHLRDGHYSGSKELGNAQDYLYPHNYPGNWVKQDYLPEKIRNHHYFQAEDTGKYERALAQRKEAIDRLRKI

SEQ ID NO: 116 - protein, 493 aa, Streptococcus pneumoniae
MRDLLSKKSHRQLELLELLFEHKRWFHRSELAELLNCTERAVKDDLSHVKSAFPDLIFHSSTNGIRIINTDDSDIEMVYHHFFKHSTHFSILEFIFFNEGCQAESICKEFYISSSSLYRIISQINKVIKRQFQFEVSLTPVQIIGNERDIRYFFAQYFSEKYYFLEWPFENFSSEPLSQLLELVYKETSFPMNLSTHRMLKLLLVTNLYRIKFGHFMEVDKDSFNDQSLDFLMQAEGIEGVAQSFESEYNISLDEEVVCQLFVSYFQKMFFIDESLFMKCVKKDSYVEKSYHLLSDFIDQISVKYQIEMENKDNLIWHLHNTAHLYRQELFTEFILFDQKGNTIRNFQNIFPKFVSDIKKELSHYLETLEVCSSSMMVNHLSYTFITHTKHLVINLLQNQPKLKVLVMSNFDQYHAKFVAETLSYYCSNNFELEVWTELELSKESLEDSPYDIIISNFIIPPIENKRLIYSNNINTVSLIYLLNAMMFIRLDE

SEQ ID NO: 117 - protein, 321 aa, Streptococcus pneumoniae
MKTSLKLYFTALVASFLLLLGACSTNSSTSQTETSSSAPTEITIKSSLDEVKLSKVPEKIVTFDLGAADTIRALGFEKNIVGMPTKTVPTYLKDLAGTVKNVGSMKEPDLEAIAALEPDLIIASPRTQKFVDKFKEIAPTVLFQASKDDYWTSTKANIESLASAFGETGTQKAKEELAKLDKSIQEVATKNESSDKKALAILLNEGKMAAFGAKSRFSFLYQTLKFKPTDTTFEDSRHGQEVSFESVKEINPDILFVINRTLAIGGDNSSNDGVLENALIAETPAAKNGKIIQLTPDLWYLSGGGLESTKLMIEDIQKALK

SEQ ID NO: 118 - protein, 199 aa, Streptococcus pneumoniae
MKVLVAEDQSMLRDAMCQLLAFQADVESVLQAKNGQEAIQLLEKESVDIAILDVEMPVKTGLEVLEWIRAEKLETKVVVVTTFKRPGYFERAVKAGVDAYVLKERNIADLMQTLHTVLEGGKEYSPELMEVVMMHPNPLTEQEIAVLKGIAQGLSNQEIADQLYLSNGTVRNYVTNILSKLDAGNRTEAANIAKESGWL

SEQ ID NO: 119 - protein, 365 aa, Streptococcus pneumoniae
MLERLKSIHYMFWISLIFMIFPILPVVTGWLSAWHLLIDILFVVAYLGVLITKSQRLSWLYWGLMLSYVVGNTAFVAVNYIWFFFFLSNLLSYHFGVRSFNSLHVRTFLLAQVLVVGQLLIFQEVEVEFLVYLLGILTFIDLMTFGLVRIRIMEDLKEAQAKQNAQINLLLAENERSRIGQDLHDSLGHTFAMLSVKTDLALQLFQIQAYPQVEKELREIQQISKESMREVRTIVENLKSRTLISELETVKKMLEIAGIEVETDNQLDTASLTQKLESTASMILLELVTNIIKHAKASKVYLKLERTEKELILTVRDDGCGFASIKGDDLHTVRDRILPFSGEVKVISWKQPTEVQVRLPYKERK

SEQ ID NO: 120 - protein, 557 aa, Streptococcus pneumoniae
MVLDKASCDLLQYLMDQETSKTIMAISKDLKESRRKIYYHIDKINAALGDEALHIISIPRIGIHLTEEQRDACCKLLSEVDSYDYIMSAHERMMIMLLWIGISKERITIEKLIELTEVSRNTVLNDLNSIRYQLTLEQYQVTLQVSKSQGYHLHAHPLNKIQYLQSLLYHIFMEENATFVSILEDKMKERLDDECLLSVEMNQFFKEQVPLVEQDLGKKINHHEITFMLQVLPYLLLSCHNVEQYQERHQDIEKEFSLIRKRIEYQVSKKLGERLFQKFEISLSGLEVSLVAVLLLSYRKDLDIHAESDDFRQLKLALEEFIWYFESQIRMEIENKDDLLRNLMIHCKALLFRKTYGIFSKNPLTKQIRSKYGELFLATRKSAEILEGAWFIRLTDDDIAYLTIHIGGFLKYTPSSQKNMKKVYLVCDEGVAVSRLLLKQCKLYFPNEQIDTVFTTEQFKSVEDIAQVDVVITTNDDLDSRFPILRVNPILEAEDILKMLDYLKHNIFRNKSKSFSENLSSLISSYIVDSKLASKFQEEVQTLINQEIVVQAFLEDI

SEQ ID NO: 121 - protein, 752 aa, Streptococcus pneumoniae
MLSLQEFVQNRYNKTIAECSNEELYLALLNYSKLASSQKPVNTGKKKVYYISAEFLIGKLLSNNLINLGLYDDVKKELAAAGKDLIEVEEVELEPSLGNGGLGRLAACFIDSIATLGLNGDGVGLNYHFGLFQQVLKNNQQETIPNAWLTEQNWLVRSSRSYQVPFADFTLTSTLYDIDVTGYETATKNRLRLFDLDSVDSSIIKDGINFDKTDIARNLTLFLYPDDSDRQGELLRIFQQYFMVSNGAQLIIDEAIEKGSNLHDLADYAVVQINDTHPSMVIPELIRLLTARGIELDEAISIVRSMTAYTNHTILAEALEKWPLEFLQEVVPHLVPIIEELDRRVKAEYKDPAVQIIDESGRVHMAHMDIHYGYSVNGVAALHTEILKNSELKAFYDLYPEKFNNKTNGITFRRWLMHANPRLSHYLDEILGDGWHHEADELEKLLSYEDKAAVKEKLESIKAHNKRKLARHLKEHQGVEINPNSIFDIQIKRLHEYKRQQMNALYVIHKYLDIKAGNIPARPITIFFGGKAAPAYTIAQDIIHLILCMSEVIANDPAVAPHLQVVMVENYNVTAASFLIPACDISEQISLASKEASGTGNMKFMLNGALTLGTMDGANVEIAELVGEENIYIFGEDSETVIDLYAKAAYKSSEFYAREAIKPLVDFIVSDAVLAAGNKERLERLYNELINKDWFMTLLDLEDYIKVKEQMLADYEDRDAWLDKVIVNISKAGFFSSDRTIAQYNEDIWHLN

SEQ ID NO: 122 - protein, 408 aa, Streptococcus pneumoniae
MKVFLQNRDFRQLTINQWISTLGDTIFYLAFLNYVADASFAPLTILLITISETLPQILQIFLGVLADFQHHRVLKYTVISFAKFLLYSIVSLSLSGQSFSLLLVAFICLLNLLSDTLSYFSGAMLTPIFIRIIGQDHLAEAIGFKQSTVSLVKTISNILGGVLLGILSIQFISLLNALTFLIAFLGILFIKTDLLKVEKTISYQEGLSVKSFCQHLLQSSKLIWNMNKVLLVLFIISTSQAVINVTVPVSTLFLRNQPFLNLQTGQSLALLSTFELSALIVGSLVSGYLQHTISIKTALYASLVIQLLLLVGFATVRFDWILIFSTLDAFFAGVLSPRLQELVFKQIPEESMGAVQSSIGAITVVLPSLFTIALVTIATSFGTLAVSFVLLLFLLVAFVMLLNIRESI

SEQ ID NO: 123 - protein, 401 aa, Streptococcus pneumoniae
MEYRKIQEALEALQKGRLVLVIDDKDRENEGDLICSAQAATTENVNFMATYAKGLICMPMSESLANQLMLSPMVENNTDNHKTAFTVSIDYKETTTGISAEERGLTARMCVAEDITPSDFRRPGHMFPLIAKKGGVLERSGHTEATVDLLKLAGLKECGLCCEIMNHDGKMMRTDDLIQFSKKHNIPLITIKELQEYRKVYDQLVERVSTVNMPTRYGNFKAISYIDKLNGEHHLALIMGNIEDEANVLCRVHSECLTGDVLGSLRCDCGQQFDKAMKMIVENGSGVLLYLRQEGRGIGLINKLKAYHLQDQGMDTLDANLALGFEGDLREYHIGAQMLKDLGLQSLHLLTNNPDKVEQLEKYGITISSRISIEIEANPYDSFYLETKKNRMGHILNMEEK

SEQ ID NO: 124 - protein, 478 aa, Streptococcus pneumoniae
MSKFPKEFLWGGATAANQYEGAYNVGDKGLSVQDVTPRGGVPVSDNDPNPFITELPTEDNLKLEGIDFYHRYKEDVALFAEMGFKVFRTSIAWSRIFPNGDELEPNEEGLQFYDNLFDELAKYGIEPLVTLSHYETPLHLARKYNGWVNRDLIGFYERYVRTVFNRYKNKVKYWLTFNEINSVLHVPFISGGIATPVEKLSKQDLYQAVHHELVASALATKVGHEINPEFKIGCMVLAMPTYPMTPKPEDVLAAREFENQNYLFSDIHARGKYPKYIQRFFKENDINIKFESGDKELLAENTVDFISFSYYMSSVQAHDPENYQSGIGNLLGGIANPYLESSEWGWQVDPIGLRIVLNNLYDRYQLPLFIVENGLGAKDVLIEGADGPTVDDDYRIDYLKKHLQQVGEAIEDGVELLGYTTWGCIDLVSASTAQMSKRYGFIYVDRNDDGSGTLNRYKKKSFYWYKEVIESNGETLYD

SEQ ID NO: 125 - protein, 234 aa, Streptococcus pneumoniae
LEMGKLSSHMWRLNQIIYTKYFWGYVLFWILICLGLWYWLEGNDRLVIEILKGPNLSQNSFLVLSIWLLHWFIIHTFFLAVVYRRRASDFFMEVIRFSSIKLWIRYQIWTCFLYGLILIMVKVLVIQFMLQLPNWDIGVLFIVDSLNACVLSLLCFMLYALGANVQMNFACVSFFLLMIVFGGLFVGNRTNYLFYILNRGNGDIGRDLFLQLLFLVFLFKSIFYFTRQKRRFIE

SEQ ID NO: 126 - protein, 702 aa, Streptococcus pneumoniae
MKKVRFIFLALLFFLASPEGAMASDGTWQGKQYLKEDGSQAANEWVFDTHYQSWFYIKADANYAENEWLKQGDDYFYLKSGGYMAKSEWVEDKGSFYYLDQDGKMKRNAWVGTSYVGATGAKVIEDWVYDSQYDAWFYIKADGQHAEKEWLQIKGKDYYFKSGGYLLTSQWINQAYVNASGAKVQQGWLFDKQYQSWFYIKENGNYADKEWIFENGHYYYLKSGGYMAANEWIWDKESWFYLKFDGKIAEKEWVYDSHSQAWYYFKSGGYMTANEWIWDKESWFYLKSDGKIAEKEWVYDSHSQAWYYFKSGGYMTANEWIWDKESWFYLKSDGKIAEKEWVYDSHSQAWYYFKSGGYMTANEWIWDKESWFYLKSDGKMAEKEWVYDSHSQAWYYFKSGGYMAKNETVDGYQLGSDGKWLGGKTTNENAAYYQVVPVTANVYDSDGEKLSYISQGSVVWLDKDRKSDDKRLAITISGLSGYMKTEDLQALDASKDFIPYYESDGHRFYHYVAQNASIPVASHLSDMEVGKKYYSADGLHFDGFKLENPFLFKDLTEATNYSAEELDKVFSLLNINNSLLENKGATFKEAEEHYHINALYLLAHSALESNWGRSKIAKDKNNFFGITAYDTTPYLSAKTFDDVDKGILGATKWIKENYIDRGRTFLGNKASGMNVEYASDPYWGEKIASVMMKINEKLGGKD

SEQ ID NO: 127 - protein, 252 aa, Streptococcus pneumoniae
MVVYIRQSKLPSEVSINKYHAQVGAYLQGEEAVLYQSFSEIKELTSEDIVVDYIMETRALLKMMGLNVPVHDYPIELKEFYGRKIYAGILGEIVNIPDNWGKFIKPKAGSKVFTGRVVNGTHDLIGIGLPFDYPIWISEVVEFIAEWRCFVLDGRVLDVRPYTGDYHAQFDASVIDEAISCWKDAPIAYGLDIGVTRDGRTLVVEVNDGYALGNYGLSPLKSINFHRARWKEMVKPYFEKNEIFKIQQDVVF

SEQ ID NO: 128 - protein, 290 aa, Streptococcus pneumoniae
MLAEAIIKNGIEIVVVTDHNTTKGIKKLQMAVSIIMKNYPIYDIHPHILHGVEISAADKLHIVCIYDYEQESWVNQWLSENIISEKDGSYQHSLTIMKDFNNQKIVNYIAHFNSYDILKKGSHLSGAYKRKIFSKENTRFLEFNINSKESSQQLDILYKEVGVLSLGQKVVAMLDFLLAYSDYSKDFRPLIIDQPEDNLDNRYIYRHLVQQFRDVKAQRQIILATHNATIVTNSMTDQVVIMESDGVNGWIESQGYVSEKYIKNHIINQLEGGKDSFKHKMSIYETALSE

SEQ ID NO: 129 - protein, 200 aa, Streptococcus pneumoniae
MSEVDFNEAVNYEFTSDTCQLANSIYQSLFKFFDKKNFSGDLIFTWKSPSLVKEGDYIGRRDSQVDNLRVIGNIFPNYLTNRKYSLNMNRNGCMGDFPHDFFDIYLDHVAKYAYEQKVNNIKEYYPLKRAILHQENALYFRFFSNFDDFLEKNYLKTIWQVSKETPFSEMDFNMFKNISEKIIFERGSKMLNDLKSNYKK

SEQ ID NO: 130 - protein, 243 aa, Streptococcus pneumoniae
MVNNVAVKVSNLSKEFLLGQDKTVSILKDISLSVNYGEFVSILGVSGSGKSTLLSCLSSLSEPTSGEVVINGVNPYTLKEGKLAKFRRQDIAIIFQNYNLVPALPVLENVTLPLRLSGKSVDSNKVKKMLDSLNFKAELSSLVATLSGGEQQKVAITRAIIADSKIIFADEPTGALDSVSRKLIFETLRNLASQGKCVLMVTHDIELASKTDRALILKDGKISRQIIKPSADELYQALESSKD

SEQ ID NO: 131 - protein, 1032 aa, Streptococcus pneumoniae
MAKLIPGKIRIEGVALYETGKVDIIKEKNNRLYARVAEEELRYSLEDDLVFCACDFFQKRGYCVHLAALEHFLKNDERGQEILWSLEEGHEEKEAVETKVTLGGKFLDRILSPKSECAYELSAVGQVEAGTNHILWTLRIGQINSQKYYVIRDIPLFLRIVEQRKSYMIGKIYEESLSWEAFDDASQELLTFLHGLTEEGLVSDLFFQNQGRHLFFPLTFFEQGVNLLMALPHFQFDHQVDSYQTLLFQDMHADANLFAFTVTEYSDYFEMEISESPRVNVFYQGAVLFHKGQVYFLTDQQMRLLKEIKALPVGQQGKKYLQFDSSDRDKLASCLTLFIQMGTVSAPERLQIKTFAPSFYFDREEDNRIRLEIQFDYGNRQVSSRQELEELPFSSDADLEERIFQVCLAAGFEADFQSWRQALKAESVYHFFHDIIPVFEKLGHVDLSDKLEELYSLASPQVQIASKGGLLEIQFDFQDIAQEEIDQAMQALVANQDFYIDSSNQVYFFDEETKKIRQNLQELGQFELKDGTLQARKSLAYSLAHLFEGRDRVSFSQEFQNLAQDLTHPEDFPRQATQVQADLRDYQEKGIGWLQMLHHYGFGGILADDMGLGKTLQTIAFLTSQVTKESRVLILAPSGLIYNWADEFQKFAPQLDVAVVHGLKASREEILAESHQIYVTSYATFRQDSELYQGMAFDFLFLDEAQVMKNAQTKIAQTLRQFVVPSVFALSGTPIENHLGELWSIFQIVMPGLLPSKKEFMKLPAERVAQFIKPFVMRRKKEEVLTELPDLIEVVYKNELEDQQKAIYLAQLQQMRDHLAQVSEQEFQRSRVEILSGLMRLRQICDTPALFMEDYQGASGKLDSLRDLLVQVADGGHRVLIFSQFKGMLEKIEQELPDLGLTSFKITGSTPAKERQDMTKAFNQGERDAFLISLKAGGVGLNLTGADTVILVDLWWNPAVEAQAIGRAHRMGQEETVEVYRLVTKGTIEEKIQELQEQKKHLVSQVLDGTESRGSLTLAEIREILGISEAST

SEQ ID NO: 132 - protein, 179 aa, Streptococcus pneumoniae
LTEKIQEHELIKTNQAEKSVQDVLDNCIERVQNNSLKSDRVTSFETPFALLFIFATIAVMLTYGGYRVSAGYISVGTLVSFLIYLFQLLNPISNIANFVTVYSRSKGSSVALDNLLAVPKEKFEGGKSVSGQGLNFNHVYFGYDENRPVLKDITCSIFKGQKLLLLDHLDQENQRLCVC

SEQ ID NO: 133 - protein, 434 aa, Streptococcus pneumoniae
MTPIKDKVRRVKTPMMVNPDTDLTISSVQQDYFSLALIGFSLLTGDFLSFSKGDQKTGLSAFIKICHLIKIARLDNKITKQQEYWLYDLLMMSQGEKIQKIKQLKQVTSDILLNTPDFSSYFEKYNFKEEAENIKSYLLAKSMDKSGRLFPSNEFGEFVSPVSFQHGFGGVLFFMNKYYVEEDENTVKEWLTKLENYEAANFLHGYSLLFGKAGFLFGILDRYEKTKERYLIDISKRLVDHLMRVYDNISNLDFALGKSGILLSLMKYCTIFDDKKLANFIKNNINDAYSLLESEDNGDIYSNNFAHGRSGAAYVLKAYTDIFGDSRYQNHLQKFSDGISELLEEKLSSFSKLDNLGLSWCDGVSGLILYLCLIDKERYSEIIYKSQLEMVQQYEAMGTSFCHGLSSLLQTTIYNKNQKVEQFIKKNLIDSFLS

SEQ ID NO: 134 - protein, 277 aa, Streptococcus pneumoniae
MKKKSGIYLDILSHVLLVGATIVAVFPLVWIIISSVKGKGELTQYPTRFWPEQFTLDYFTHVINDLHFIDNIRNSLIIALATTLIAIIISAMAAYGIVRFFPKLGAIMSRLLVITYIFPPILLAIPYSIAIAKVGLTNSLFGLMMVYLSFSVPYAVWLLVGFFQTVPIGIEEAARIDGANKFVTFYKVVLPIVAPGIVATAIYTFINAWNEFLYALILINNTGKMTVAVALRSLNGSEILDWGDMMAASVIVVLPSIIFFSIIQNKIASGLSEGSVK

SEQ ID NO: 135 - protein, 255 aa, Streptococcus pneumoniae
MFWNLVHYEFKNVNKWYLALYAAVLVLSALIGIQTQGFKNLPYQESQATMLLFLATVFGGLMLTLAISTIFLIIKRFKGSVYDRQGYLTLTLPVSEHHIITAKLIGAFIWSLISTAVLALSAVIILALTAPEWIPLSYVITFVETHLPQIFLTGISFLLNTISGILCIYLAISIGQLFNEYRTALAVAAYIGIQIVIGFIELFFNLSSNFYVNSLVGLNDHFYMGAGIAIVKELIFIAIFYLGTYYILRNKVNLL

SEQ ID NO: 136 - protein, 399 aa, Streptococcus pneumoniae
MRNMWVVIKETYLRHVKSWSFFFMVISPFLFLGISVGIGHIQGSSMAKNNKVAVVTTVPSVAEGLKNVNGVNFDYKDEASAKEAIKEEKLKGYLTIDQEDSVLKAVYHGETSLENGIKFEVTGTLNELQNQLNRSTASLSQEQEKRLAQTIQFTEKIDEAKENKKFIQTIAAGALGFFLYMILITYAGVTAQEVASEKGTKIMEVVFSSIRASHYFYARMMALFLVILTHIGIYVVGGLAAVLLFKDLPFLAQSGILDHLGDAISLNTLLFILISLFMYVVLAAFLGSMVSRPEDSGKALSPLMILIMGGFFGVTALGAAGDNLLLKIGSYIPFISTFFMPFRTINGYAGGAEAWISLAITVIFAVVATGFIGRMYASLVLQTDDLGIWKTFKRALSYK

SEQ ID NO: 137 - protein, 645 aa, Streptococcus pneumoniae
MDYSKVAAEVIEAVGKDNLVAAAHCATRLRLVLKDEAKVNQAALDNNADVKGTFSTNGQYQIIIGPGDVNFVYAEIIKKTGLKEVSTDDLKEIANKDKKFNPLMDLIKLLSDIFVPIIPALVAGGLLMALRNFLTSPDLFGPQSIEDMYPAIKGFSAMIQLMSAAPFMFLPVLVGISAAKRFGANQFLGAAIGMIMTTPDLGGKEAFWDILGFHVTQTNYAYQVIPVLVAVWLLANLEKFFHKKLPSAVDFTFTPLLSVMITGFLTFTVIGPVMLVVSDAITNAIVWLYNTTGAFGMGLFGGTYSLIVMTGLHQSFPAIETQLLSAYNNNGTGFGDYIFVVASMANVAQGAATLAVYFLTKNAKTKGLSSSAAVSAFLGITEPALFGVNLKYKFPFFCALAGSAIGAFVAGLTHVIAVSLGAAGFIGFLSIKAGSIPMYIIAEIMSFVAAFAFTYFYGKTKAASVFADEAATATAETVTEPTVEAPVVEETDTLQNETLVTPIVGDVVALADVNDPVFSSGAMGQGIAVKPSQGVVYAPADAEVSIAFPTGHAFGLKTRNGAEVLIHVGIDTVSMNGDGFEAKVAQGNKVKAGDVLGTFDSNKIAAAGLDDTTMVIVTNTADYASVAPVATGSVAKGDAVIEVKI

SEQ ID NO: 138 - protein, 256 aa, Streptococcus pneumoniae
VVEIIYFLIIIIASGLGSISGMGGGIIIKPLMDSFGYHSVSDIAFYSSFSVFIMAIISTTKRFSQSKEIKWRLIFTVSFSSVLGGFLGHLIFQVLLSQLSVRLVSIVQMILLFVMLLVSFVLTDFKKTYQFDKIGFYMICGLLLGLISSFLGIGGGPLNVSLLMVFFSISIKEATMYSLAIIFFSQLSHLATIVVVTGLNQYHLAPVPVIFLASICGGVLGTVVSKVLPENWVRYCFKGMLFFVMGMTLYNLFHIL

SEQ ID NO: 139 - protein, 451 aa, Streptococcus pneumoniae
MNTMLDKMQEKLSPIAMKVGNQKFLVALRDSFVGTMPVIMTGSIALLLNAFLVDLPQQFHLESITKTFQWLVDINNLVFKGSIPIVSLLFIYCLGVNIAKIYKVDTVSAGLVSLASFVISIGSTVTKSFPLANVGDVKLDQILQGIDNLAFDGKNLMVTIGNVIPGNHINARGYFTAMMIGFLASIIFCKVMKKNWVIKLPDSVPPAIAKPFTSIIPGFMAMYIVAILTYVFHLLSNDLLIDWVYKVLQTPLLGLSQSFFAVILMIFLNKLFWFFGLHGGNVLAPIMEGLFGVAMLANLDAFQKGEPIPYIWTSGSFGAFVWFGGLGLVLAILIFSRNSHYRKVAKLGLAPVLFNIGEPVNYGLPVVLNPLLFIPFVLSPVFMATVAYWATSWGLVSPVTQNVTWVMPPILYGFFSTAFDWRAIILSVVCLIISVLTYFPFVKMAYKTELS

SEQ ID NO: 140 - protein, 236 aa, Streptococcus pneumoniae
MTATSLGLSNIEIVVRIVLSVVIGSIIGLERGSKSQPAGIRTYSIVCLAACLIMMTNEYVSYKFGTGDPTRLGAQVISGVGFLGAGTILITDKKKITGLTTAAGIWASAGIGLAIGVGFYEGALLVAISVWGVISMFQPLKKYLQNRSKMIELYIVVKSTEAYNRVLVYCAENGIRMTDSRTAFGDVNSDRIEYFDVPDKKIASFITLELSGRFEHLRLMEEIANIVGVIYVEEIS

SEQ ID NO: 141 - protein, 219 aa, Streptococcus pneumoniae
MKNLTKIKFKENGEFNHFSGNTVVANLYTKQDLMEVVDIIQSRYRELPFIDKFTLTPRNSIHMTVIELLCHENRETEFWSSNLPLDTPLQEIHDYFAKQLEIFPLLDEEIHMRITEMGKQNILVEPADEASAKRLEEIRTYVSEKAGVCFPNHDRYQFHISIGYLRIPLTEEEEEEFTKVRAELTEILLEKIPTITVNRIDYTVFEDMRQFVPYHEKFK

SEQ ID NO: 142 - protein, 254 aa, Streptococcus pneumoniae
MELHFNLELVETYKSNSQKARILTEDWVYRQSYCPNCGNNPLNHFENNRPVADFYCNHCSEEFELKSKKGNFSSTINDGAYATMMKRVQADNNPNFFFLTYTKNFEVNNFLVLPKQFVTPKSIIQRKPLAPTARRAGWIGCNIDLSQVPSKGRIFLVQDGQVRDPEKVTKEFKQGLFLRKSSLSSRGWTIEILNCIDKIEGSEFTLEDMYRFESDLKNIFVKNNHIKEKIRQQLQILRDKEIIEFKGRGKYRKL

SEQ ID NO: 143 - protein, 309 aa, Streptococcus pneumoniae
MLKILNNSVIYLCLIPLLFLLLIIFPNDSLIYYFRLILISLISITLHELGHFLVGRCLSYKLEMLATPFFFYFRKKIYFKFPVLLAFGYCQMSNRNITNEKNSDRNLVFYFFGGGGANLIVAILALLGFVPYASEFFILNIILFLVTVCLPIDGTDGNAIREIVLYSKDSKTYQRFFANSLYNNPYITIDDFAKLTSKEKSFFSKFEKCLINLYFEVKGEGSAFTIANHEVFDSNIQENIIHEYYKLLHKSSDWIIPQNLSLEEVVFTLSNYIYSKNNKYLEKIKYLKKLVDFRQEEIIDFILNKEEVL

SEQ ID NO: 144 - protein, 380 aa, Streptococcus pneumoniae
MSDSPIKYRLIKKEKHTGARLGEIITPHGTFPTPMFMPVGTQATVKTQSPEELKEMGSGIILSNTYHLWLRPGDELIARAGGLHKFMNWDQPILTDSGGFQVYSLADSRNITEEGVTFKNHLNGSKMFLSPEKAISIQNNLGSDIMMSFDECPQFYQPYDYVKKSIERTSRWAERGLKAHRRPHDQGLFGIVQGAGFEDLRRQSAHDLVSMDFSGYSIGGLAVGETHEEMNAVLDFTTQLLPENKPRYLMGVGAPDSLIDGVIRGVDMFDCVLPTRIARNGTCMTSQGRLVVKNAQFAEDFTPLDPECDCYTCNNYTRAYLRHLLKADETFGIRLTSYHNLYFLLNLMKQVRQAIMDDNLLEFREYFVEKYGYNKSGRNF

SEQ ID NO: 145 - protein, 271 aa, Streptococcus pneumoniae
MSKYLLKLLVYCFSALTFGSLFLIIGFILIKGLPHLSLSLFSWTYTSENISLMPAIISTVILVFGALLLALPIGIFAGFYLVEYTKKDSLCVKIMRLASDTLSGIPSIVFGLFGMLFFVVFLGFQYSLLSGILTSVIMVLPVIIRSTEEALLSVSDSMRQASYGLGAGKLRTVFRIVLPVAMPGILAGVILAIGRIVGETAALMYTLGTSTNTPSSLMSSGRSLALHMYMLSSEGLHVNEAYATGVILIITVLMINTLSSLLSRKLVKGAS

SEQ ID NO: 146 - protein, 423 aa, Streptococcus pneumoniae
MSSKFMKSTAVLGTVTLASLLLVACGSKTADKPADSDSSEVKELTVYVDEGYKSYIEEVAKAYEKEAGVKVTLKTGDALGGLDKLSLDNQSGNVPDVMMAPYDRVGSLGSDGQLSEVKLSDGAKTDDTTKSLVTAANGKVYGAPAVIESLVMYYNKDLVKDAPKTFADLENLAKDSKYAFAGEDGKTTAFLADWTNFYYTYGLLAGNGAYVFGQNGKDAKDIGLANDGSIAGINYAKSWYEKWPKGMQDTEGAGNLIQTQFQEGKTAAIIDGPWKAQAFKDAKVNYGVATIPTLPNGKEYAAFGGGKAWVIPQAVKNLEASQKFVDFLVATEQQKVLYDKTNEIPANTEARSYAEGKNDELTTAVIKQFKNTQPLPNISQMSAVWDPAKNMLFDAVSGQKDAKTAANDAVTLIKETIKQKFGE

SEQ ID NO: 147 - protein, 502 aa, Streptococcus pneumoniae
MSQEKYIMAIDQGTTSSRAIIFNKKGEKVSSSQKEFTQIFPQAGWVEHNANEIWNSVQSVIAGAFIESGVKPNQIEAIGITNQRETTVVWDKKTGLPIYNAIVWQSRQTAPLAEQLKSQGYVEKFHEKTGLIIDAYFSATKVRWILDHVEGAQERAEKGELLFGTIDTWLVWKLTDGAAHVTDYSNAARTMLYNIKELKWDDEILEILNIPKAILPEVRSNSEIYGKTAPFHFYGGEVPISGMAGDQQAALFGQLAFEPGMVKNTYGTGSFIIMNTGEEMQLSENNLLTTIGYGINGKVYYALEGSIFIAGSAIQWLRDGLRMVENSPESEKYARDSHNNDEVYVVPAFTGLGAPYWNQNARGSVFGLTRGTSKEDFIKATLQSIAYQVRDIIDTMQVDTQTAIQVLKVDGGAAMNNFLMQFQADILGIDIARAKNLETTALGAAFLAGLSVGYWKDLDELKLLNETGELFEPSMNESRKEQLYKGWKKAVKATQVFAEVDD

SEQ ID NO: 148 - protein, 804 aa, Streptococcus pneumoniae
MRYSIRKFSVGVASVAVASLFMGSVVHATEKEGSTQAATSFNRGNGSQIERRKAAEQAIVSLSGYMTSLLNDGLDTSDSRFEELLKRAKGIVEEYRKKIDGASDREKIEKLQQEGQTKLDELVDKFKKGLSSSEQNGHATPKDPSRNDGVQGDDSSVGQGEQPGASNQKNPESVPPTASGETDSPTKPKTSNDSVNSLERELKEVKETAKTTLNTYMLTRLKQENPGVFWFADLLRESKESVEKYKRMFDEASSKENVENLVKEAKQEIEALVVKHKGREIDLERTKAKTVIAKYLTGLLDDIKKNLKKEQHINTVELIKKLGDIKRTYLYKLDESTQKAQLQELVTESQSKLDEAFSKFKNGLSSSSSSGSSTKPETPQPEKPEHQKPTTPAPDTKPSPQPEGKKPSVPDINQEKEKAKLAVATYMSKILDDIQKHHLQKEKHRQIVALIKELDELKKQALSEIDNVNTKVEIENTVHKIFADMDAVVTKFKKGLTQDTPKEPGNKKPSAPKPGMQPSPQPEVKPQLEKPKPEVKPQPEKPKPEVKPQLEKPKPEVKPQPEKPKPEVKPQLEKPKPEVKPQLEKPKPEVKPQPEKPKPEVKPQLEKPKPEVKPQPEKPKPEVKPQLEKPKPEVKPQPEKPKPEVKPQLEKPKPEVKPQLEKPKPEVKPQLEKPKPEVKPQPEKPKPEVKPQLEKPKPEVKPQPEKPKPEVKPQPEKPKPEVKPQLEKPKPDNSKPQADDKKPSTTNNLSKDKQPSNQASTNEKATNKPKKSLPSTGSISNLALEIAGLLTLAGATILAKKRMK

SEQ ID NO: 149 - protein, 289 aa, Streptococcus pneumoniae
MESNLKKTTFIIVMIGISLIPALYNIIFLSSMWDPYGQLSDLPVAVVNNDKEASYNGNTMAIGKDMVSNLKENKTLDFHFVDEEEGKKGLEDGDYYMVVTLPSDLSEKATTLSNIQSTAAYQSLTSEQQTEISDSVSQNSTDSIQSAQSIVALVQDLQGSLENLQNQSSNLSTLKNQANQVLPITSTSLIGLSSGLTEIQGAVTSKLVPASQSIASGVNAYTTGVDKVSQGASQLSEKNATLTGSLDQLVSGSNTLTQKSSSLTAGVGQLVEKTPELVSGIEKLSTGSN

SEQ ID NO: 150 - protein, 417 aa, Streptococcus pneumoniae
MKCFVGLDISSTKLDVCIMLSDTSTPVTASLSNDLSGATEIKNHILDLNHTYHFERIVIGMEATSLYSFHPAMFFHEDRQLKELHVEIMVEQPNKIKKYRDAFEENKNDTIDAFYIADYFRIERFSPSFLKEEKYMALQHLTRTRLQIIEQLTRTKQHFIENIYYKCNTLAYQFKKEELSTNLWSSTMMTLMTDEMTLDELANMPLQELDDWLQKLGKGHFKDSEKLAQTIQAAIRGSYRLSKLQQDSVNVILGLLAREIRNLEKMIKEIDKAIEDMVETIPEYQCLTSIPGVGKVYAAGIIAEIGQIERFKDHPQVAKFAGLNWREKQSGNSNSQHTSLVNRGNRYLRYYLVEAANSVRRYDDEYKDFYKKKYHEVPKHQHKRAILLTARKFVRLVDVLLRNHQLYTPPRRIMEDN

SEQ ID NO: 151 - protein, 307 aa, Streptococcus pneumoniae
MAKKKIKKEKIDNVGIHSFSKKADIFFSIISGLIALSCILPFVFVIIISVTDEKSLLQYGYSFFPSQFGLDGFEFLAQFKDKILQALFISVFVTVVGTLTNVFITTTYAYAISRTTFKYRRFFTIFVLLSMLFNAGLVPGYIMVTRVLQLGDTVWALIVPMLLSPFNIILMRSFFKKTIPEAILESARIDGASEARIFFQICLPLSLPGIATITLLTALGFWNDWFNALLYIKSDNLYPLQYLLMQIQQNMDYIAKAVGLTGQLGVALPKETGRMAMVVVATLPIAILYPFFQRYFVKGLTIGGVKE

SEQ ID NO: 152 - protein, 352 aa, Streptococcus pneumoniae
MKDDQKYLLAGLYSLLVAIFYFPLIESKGIFVSILMAVLLLYLIYFIGTVIHIVIIKFIRKKSFKYLVLYPFTYDGSWRFQPINLLYFPEMVRDVIPINLVQEYCQGQPYGLLKKMLKRIRLSREIALLLATVIVYFFTHRILPLSVFTFIFSYILLFAQSYLGGNTVWIGNRRLIIDDEFEKILLSKSYIKEISSARYSEYLTCEYKNFTPIILLAIFENLLDSYLIQNQSKVDLDIFYKVLPLLYKEKYTMGFNYFVSLNYLLYKVGFLGIIYDNEALRDLSKQYLNKNISELQDGSFEGGIQDAVASKQIVVINEFIACLNSRCVPSQYDRFFYKDRPYIFSRKSPIKG

SEQ ID NO: 153 - protein, 428 aa, Streptococcus pneumoniae
MYKVLLVDDEYMVTEGLKRLIPFDKWDMEVVATASHADEALEYVQENPVDVIISDVNMPDKTGLDMIREMKEILPDAAYILLSGYQEFDYVKRAMNLSVVDYLVKPVDKVELGNLLEKIAGQLGERGKKSQTLSQELDEAGFVSYLGDKENWWIGLSKEKQGSFTIPYYVLGQDWQIFISDQPLDGLVVTPFEAPYQEHFERWKLNAEKTLFYGSVNLQQSESLFAYYEPIYRVIIQGNLNQIVEELNLLEKVVLENTPRVPITKQLFIQFVMDVFHLFEHLKADDLTDIVKTIHAIQSFDELVPYIKETLTSFFGQYRMNENVVSVLEVIGRDYQKELSLKDISKALFINPVYLGQLIKRETDSTFAELLNKQRIKAAQQLLLSTSDSIEDICYAVGYSNLGYFYKVFRKLCGKSPKAYRKQVETIL

SEQ ID NO: 154 - protein, 185 aa, Streptococcus pneumoniae
MDKKNLLVLVTGSVGASNVDTYLYYIKKFYNVKVILSENSKKFISKELISYFCDKVYDEIFVEEVVPHVFLPYESDLLLILPATANVIGKIANGIADDLVTATVLNFNKKIIFCPNMNSTMWDNHIVQRNVSILKELGHIFLFESKKTYEVGLRKAIDSTCSMLQPQSLVKELIKLENIVLEEGH

SEQ ID NO: 155 - protein, 343 aa, Streptococcus pneumoniae
MVSTIGIVSLSSGIIGEDFVKHEVDLGIQRLKDLRLNPIFLPHSLKGLDFIKDHPEARAEDLIHAFSDDSIDMILCAIGGDDTYRLLPYLFENDQLQKVIKQKIFLGFSDTTMNHLMLHKLGIKTFYGQSFLADICELDKEMLAYSLHYFKELIETGRISEIRPSDIWYEERTDFSPTALGTPRVSHTNTGFDLLQGRAQFEGKILGGCLESLYDIFDNSRYADSTELCQKYKLFPDLSDWEGKILLLETSEEKPKPEDFKKMLLTLKDTGIFAVINGLLVGKPMDETFHDDYKEALLDIIDSNIPIIYNLNVGHATPRAIVPFGVHAHVDAQEQVIRFDYNK

SEQ ID NO: 156 - protein, 349 aa, Streptococcus pneumoniae
MVELGISTFGEITELEGTGQTYSHAERIRQLVAEIELADKVGLDVYGIGEHHRADFAVSAPEIVLAAGAVNTKKIRLTSAVSILSSMDPIRLFQQYATIDALSNGRSEIMAGRGSFTESFPLFGYDLKDYDSLFDEKLDLLQLVNEKTKLDWQGRLTQTIAGKEVYPRPVQDKLPLWIATGGHVESTVKIAQAGLPIVYAIIGGNPRYFKKLIQAYREIGSEAGHADKDLKVGAHSWGWIAEDGEQAVKDYFHPTKQVVDAISKDRPHWQELRYEQYLEQVGPNGAMFVGNPDQVAEKLIRMIEDLGLDRFMLHLPLGSMPHDQVLRAIELFGTQVAPKVRAYFAMKEA

SEQ ID NO: 157 - protein, 339 aa, Streptococcus pneumoniae
MKAVVVNPESTGVAIEEKVLRPLETGEALVEVEYCGVCHTDLHVAHGDFGQVPGRVLGHEGIGIVKEIAPDVKSLKVGDRVSVAWFFEGCGTCEYCTTGRETLCRTVKNAGYSVDGGMAEQCIVTADYAVKVPDGLDPAQASSITCAGVTTYKAIKEAKVEPGQWVVLYGAGGLGNLAVQYAKKVFNAHVIAVDINNDKLALAKEVGADIVINGLEVEDVAGLIKEKTDGGAHSAVVTAVSKVAFNQAVDSVRAGGRVVAVGLPSETMELSIVKTVLDGIQVIGSLVGTRKDLEEAFQFGAEGLVVPVVQKRPVEDAVAIFDEMEKGQIQGRMVLDFTH

SEQ ID NO: 158 - protein, 254 aa, Streptococcus pneumoniae
MSYIQLDFHSHSLNRNVNLNIFLPDGELLPAPEQPYPTIYFLPGFSASGKELSTFLHFRTQCLLNGIAVVIPDGDNSFYLDKPERLALYSQYVSQELIDYTCSILPLSHKREETYIGGISMGGYGALVHGFRYPEKFGKIVALSPAIDVAAILNGNASQFGTTFADLFKTEEDYYSSTDHPVNALKELLDKGEDIPELFIACGFQDELVYASNRSFAEELEKLGVNLTYIEDDGGHDVFFWDKYLPAVFEFLRK

SEQ ID NO: 159 - protein, 158 aa, Streptococcus pneumoniae
MTSLYDFSVLNQNNQATPLDSYRGKVLLIVNTATGCGLTPQYQGLQELYERYQDQGFEILDFPCNQFMGQAPGSAEEINAFCSLHFQTTFPRFAKIKVNGKEADPLYVWLKDQKSGPLGKRVEWNFAKFLIGRDGQVFERFSSKTDPKQIEEAIQTLL

SEQ ID NO: 160 - protein, 701 aa, Streptococcus pneumoniae
MNNNFNNFNNMDDLFNQLMGGMRGYSSENRRYLINGREVTPEEFAHYRATGQLPGNAETDVQMPQQASGMKQDGVLAKLGRNLTAEAREGKLDPVIGRNKEIQETSEILSRRTKNNPVLVGDAGVGKTAVVEGLAQAIVNGDVPAAIKNKEIISIDISGLEAGTQYRGSFEENVQNLVNEVKEAGNIILFFDEIHQILGAGSTGGDSGSKGLADILKPALSRGELTVIGATTQDEYRNTILKNAALARRFNEVKVNAPSAENTFKILQGIRDLYQQHHNVILPDEVLKAAVDYSVQYIPQRSLPDKAIDLVDVTAAHLAAQHPVTDVHAVEREIETEKDKQEKAVEAEDFEAALNYKTRIAELEKKIENHTEDMKVTASVNDVAESVERMTGIPVSQMGASDIERLKDMAHRLQEKVIGQDKAVEVVARAIRRNRAGFDEGNRPIGSFLFVGSTGVGKTELAKQLALDMFGTQDAIIRLDMSEYSDRTAVSKLIGTTAGYVGYDDNSNTLTERVRRNPYSIILLDEIEKADPQVITLLLQVLDDGRLTDGQGNTVNFKNTVIIATSNAGFGYEANLTEDADKPELMDRLKPFFRPEFLNRFNAVIEFSHLTKEDLSKIVDLMLAEVNQTLAKKDIDLVVSQAAKDYITEEGYDEVMGVRPLRRVVEQEIRDKVTDFHLDHLDAKHLEADMEDGGLVIREKS

SEQ ID NO: 161 - protein, 141 aa, Streptococcus pneumoniae
MKLLKKMMQVALATFFFGLLGTSTVFADDSEGWQFVQENGRTYYKKGDLKETYWRVIDGKYYYFDPLSGEMVVGWQYIPAPHKGVTIGPSPRIEIALRPDWFYFGQDGVLQEFVGKQVLEAKTATNTNKHHGEEYDSPAEK

SEQ ID NO: 162 - protein, 208 aa, Streptococcus pneumoniae
MKGSFALLLFVILGYMVKFYPEMLVNFDQSIQTAIRGDLPDYLTILFRALTRLIDIPVIITWVVITAFVFYRKRWKIESFFMLGNLALAGLLIVTFKNIYQRPRPAILHLVEEKGFSFPSGHSLAVTLMVGTLIVILSQRIKNPVWRKIVQIVLGLYLVSVLVSRVYLGVHYPSDVLASLCVGLGVLFIEFPFYDKLRFQWRFKGKQK

SEQ ID NO: 163 - protein, 333 aa, Streptococcus pneumoniae
MIKTFLSALSVILFVIPIITYSFFPSSNLNIWLSTRPILAQIYAFPLATATMAAILSFVFFSLSFYKKNKQIRFYSGILLLLSLILLLFGTDKTLSSASNKTKTLKLVTWNVANQIEAQHIERIFSHFDADMAIFPELATNIRGEQENQRIKLLFHQVGLSMANYDIFTSPPTDSGIAPVTVIVKKSYDFYTKAETFHTTRFGTIVLHSRKQDIPDIIALHTAPPLPGLMEIWKQDLNIIHNQLASKYPKAIIAGDFNATMRHGALAKISSHRDALNALPPFERGTWNSQSPKLFNATIDHILLPKNHYYVKDLDIVSFQNSDHRCIFTEITF

SEQ ID NO: 164 - protein, 673 aa, Streptococcus pneumoniae
MKKLFILLSTFFLSFFLAWIIVLRAPQYLYASYDSVSLLRVKKDTQEPTREVFEQELENFANSEQSLIARRIVEPSKDGTTHFTYATYGQGTLPKEFQEASQESRERSDPLNSYLLLSGSLTKEKLADKLGDLGYKASADRKIPPYFLAFRILLNPLILISLAIFGLSFFALVIITRIKEMRAAGIKLFSGQTLLSIMGHSLSTDIKWLLLSALLSFLGGGVVLFSQGLFYPILLATYGFGISFYLLFLLAISILLMLLYLMSLNYKALVPVIKGRLPLKRLMILTLLCQLVAVFTVGYAVKTGLTSYQRLKELEISKQAWQDRADYYQISFGLGDRGKDTENQSKWYAFAKEAIEEEQALYVKDNLLHFANPQGKNEQGETLDTYSPDANTLYVSPSYLDKEKVVVDAETKQKLAHLQKGEFILLLPEHLRSREVELKKVFEERLSYYGKSGEEASAPLDYEMKAHVSYLSMGEKRFVYNNGENPVSTQYLTDPILVVFTPTSTGDSFISLSSWSINAGKQLFIKGYESGLELLKKVGIYEQVSYLKEGRSVYLTRYNEVQTETATLILGAIVGIASSLLLFYSVNLLYFEQFRRDILIKRISGLRFFETHAQYMVSQFASFVFGASLFILSSRDLVIGLLTLLVFLASAVLTLYRQAQKESRVSMTIMKGK

SEQ ID NO: 165 - protein, 237 aa, Streptococcus pneumoniae
MLKRFLALVWLRCQIILSNKSILLQVLVPFAFTYFYKYLMETQGKVNDQQALVLLMMCLPFSLALAVGSPITIILSEEKEKYNLQTLLLSGVKGSEYILSTMFLPFLLTFVIMGTTPLILGVTIVHTFNYITIVLLTSLSIILFYLLIGLTAKSQVVAQVISLPAMILVAFLPMLSGLDKTVAKITDYSFMGLFTKFFTKWEGFSWNETLIPNLTLLIWIVLLLTLITITIRKKKIS

SEQ ID NO: 166 - protein, 461 aa, Streptococcus pneumoniae
MGLELRAIQSPIFSEPFDFTFHAQAFTLLVGSSGSGKSSLFQVIAQVSSLPYSGQVLIDGSEVSQLSIIARVQKVGILFQNPNHQFTMENLFEELIFTLENIGYHLQEIDSKIAEVVQQCRCEAILHRPIHHLSGGEKQKAALAVLFAMNPRVYLLDEPFASIDRKSRIEILEILKELALDGKTVILCDHDLSDYKAYIDHMVELRDGKLREVFQIPSYEMTQVASKEVASSPELFHMNRVTGELGNRPLFSIADFTFYQGISCILGDNGVGKSTLFRSILQFQKYKGRIAWKGTVLKKKKSLYRDLTGVVQEAEKQFIRVSLREELQLDGPDSERNQRIFQALRYFDLEQAVDKSPYQLSGGQQKILQLLTILTSKASVILLDEPFAGLDDRACHYFCKWIVEERNQGRSFLLISHRLDPLISVVDYWIEMTSQGLRHVKEVTITKPLTSQSSNTQGEVR

SEQ ID NO: 167 - protein, 747 aa, Streptococcus pneumoniae
MTEIVKASLENGIQKIRIRSEKGYHPAHIQLQKGIPAEITFHRATPSNCYKEILFEEEGILEPIGVDEEKVIRFTPQELGRHEFSCGMKMQKGSYTVVEKTRKSLSLLQRFWITSIFTVPLVILMIGMLTGSISHQVMHWGTFLATTPIMLVAGKPYIQSAWASFKKHNANMDTLVALGTLVAYFYSLVALFAGLPVYFESAGFILFFVLLGAVFEEKMRKNTSQAVEKLLDLQAKTAEVLSDDSYVQVPLEQVKVGDLIRVRPGEKIAVDGVVVEGVSSIDESMVTGESLPVDKTVGDTVIGSTINHSGTLVFRAEKVGSETVLAQIVDFVKKAQTSRAPIQDLTDKISGIFVPVVVILGIMTFWVWFVLLRDSVVVLGASFVSSLLYGVAVLIIACPCALGLATPTALMVGTGRSAKMGVLLKNGTVLQEIQKVQTLVFDKTGTLTEGKPVVTDVIGDEVEVFGLAASLEDASQHPLAEAIVKRASEAGLEFQTVENFQTLHGKGVSGRINGKQVLLGNAKMLDGMDISNTYQDKLEELEKEAKTVVFLAVDNEIKGLLALQDIPKENAKLAISQLKKRGLRTVMLTGDNAGVARAIADQIGIEEVIAGVLPEEKAHEIHKLQQSGKVAFVGDGINDAPALSVADVGIAMGAGTDIAIESADLVLTTNNLLGVVRAFDMSKKTFHRILLNLFWAFIYNVVGIPIAAGVFSGVGLALNPELAGLAMAFSSVSVLTSSLLLNFSKID

SEQ ID NO: 168 - protein, 726 aa, Streptococcus pneumoniae
MMKDTFKNVLSFEFWQKFGKALMVVIAVMPAAGLMISIGKSIVMINPTFTPLVITGGILEQIGWGVIGNLHILFALAIGGSWAKERAGGAFAAGLAFILINRITGTIFGVSGDMLKNPDAMVTTFFGGSIKVADYFISVLEAPALNMGVFVGIISGFVGATAYNKYYNFRKLPDALSFFNGKRFVPFVVILRSAIAAILLAAFWPVVQTGINNFGIWIANSQETAPILAPFLYGTLERLLLPFGLHHMLTIPMNYTALGGTYDILTGAAKGTQVFGQDPLWLAWVTDLVNLKGTDASQYQHLLDTVHPARFKVGQMIGSFGILMGVIVAIYRNVDADKKHKYKGMMIATALATFLTGVTEPIEYMFMFIATPMYLVYSLVQGAAFAMADVVNLRMHSFGSIEFLTRTPIAISAGIGMDIVNFVWVTVLFAVIMYFIANFMIQKFNYATPGRNGNYETAEGSEETSSEVKVAAGSQAVNIINLLGGRVNIVDVDACMTRLRVTVKDADKVGNAEQWKAEGAMGLVMKGQGVQAIYGPKADILKSDIQDILDSGEIIPETLPSQMTEAQQNTVHFKDLTEEVYSVADGQVVGLEQVKDPVFAQKMMGDGFAVEPANGNIVSPVSGTVSSIFPTKHAFGIVTEAGLEVLVHIGLDTVSLEGKPFTVHVAEGQKVAAGDLLVTADLDAIRAAGRETSTVVVFTNGDAIKSVKLEKTGSLAAKTAVAKVEL

SEQ ID NO: 169 - protein, 271 aa, Streptococcus pneumoniae
MKKMKYYEETSALLHEFSEENQKYFEELWESFNLAGFLYDEDYLREQIYLMMLDFSEAERDGMSAEDYLGKNPKKIMKEILKGAPRSSIKESLLMPILVLAVLRYYQLLSDFSKGPLLTVNLLTFLGQLLIFLIGFGLVATILRRSLVQDSPKMKIGTYIVVGTIVLLVVLGYVGMASFIQEGAFYIPAPWDSLSVFTISLVIGIWNWKEAVFRPFVSMIIAHLVVGSLLRYYEWMGISNVFLTKVIPSAVLFIGIFVLFRGFKKIKWSEV

SEQ ID NO: 170 - protein, 752 aa, Streptococcus pneumoniae
MLCQNCKINDSTIHLYTNLNGKQKQIDLCQNCYKIIKTDPNNSLFKGMTDLNNRDFDPFGDFFNDLNNFRPSSNTPPIPPTQSGGGYGGNGGYGSQNRGSAQTPPPSQEKGLLEEFGINVTEIARRGDIDPVIGRDDEIIRVIEILNRRTKNNPVLIGEPGVGKTAVVEGLAQKIVDGDVPHKLQGKQVIRLDVVSLVQGTGIRGQFEERMQKLMEEIRKREDIILFIDEIHEIVGAGSASDGNMDAGNILKPALARGELQLVGATTLNEYRIIEKDAALERRMQPVKVDEPTVDETITILKGIQKKYEDYHHVQYTDAAIEAAATLSNRYIQDRFLPDKAIDLLDEAGSKMNLTLNFVDPKVIDQRLIEAENLKSQATREEDFEKAAYFRDQIAKYKEMQKKKITDQDTPIISEKTIEHIIEQKTNIPVGDLKEKEQSQLIHLAEDLKSHVIGQDDAVDKIAKAIRRNRVGLGTPNRPIGSFLFVGPTGVGKTELSKQLAIELFGSADSMIRFDMSEYMEKHSVAKLVGAPPGYVGYDEAGQLTEKVRHNPYSLILLDEVEKAHPDVMHMFLQVLDDGRLTDGQGRTVSFKDAIIIMTSNAGTGKTEASVGFGAAREGRTNSVLGELGNFFSPEFMNRFDGIIEFKALSKDNLLQIVELMLADVNKRLSSNNIRLDVTDKVKEKLVDLGYDPKMGARPLRRTIQDYIEDTITDYYLENPSEKDLKAVMTSKGNIQIKSAKKAEVKSSEKEK

SEQ ID NO: 171 - protein, 375 aa, Streptococcus pneumoniae
MKLEQVPTPAYVIDLAKLEANCRILQYVQEEAGCKVLLAQKAYSLYKTYPLISQYLSGTTASGLYEAKLAREEFPGEVHVFAPAFKDADLEELLEIMDHIVFNSERQLRKHGPRCREAGVSVGLRLNPQCSTQGDHALYDPCAPGSRFGVTIDKIPSDLLDLVDGLHFHTLCEQGADDLQTTLKAVEEQFGPYLHEVKWLNMGGGHHITREGYDVDLLISEIKRIRKTYNLEIYIEPGEAIALNAGYLATEVLDIVENGMEILVLDASATCHMPDVLEMPYRPPLRNGFESQEKAHTYRLSSNTCLTGDVIGDYSFENPVQIGDRLYFQDMAIYSFVKNNTFNGIGLPSLYLMDEQGDCSLLKAFGYQDFKGRLS

SEQ ID NO: 172 - protein, 627 aa, Streptococcus pneumoniae
MKKKLTSLALVGAFLGLSWYGNVQAQESSGNKIHFINVQEGGSDAIILESNGHFAMVDTGEDYDFPDGSDSRYPWREGIETSYKHVLTDRVFRRLKELGVQKLDFILVTHTHSDHIGNVDELLSTYPVDRVYLKKYSDSRITNSERLWDNLYGYDKVLQTAAEKGVSVIQNITQGDAHFQFGDMDIQLYNYENETDSSGELKKIWDDNSNSLISVVKVNGKKIYLGGDLDNVHGAEDKYGPLIGKVDLMKFNHHHDTNKSNTKDFIKNLSPSLIVQTSDSLPWKNGVDSEYVNWLKERGIERINAASKDYDATVFDIRKDGFVNISTSYKPIPSFQAGWHKSAYGNWWYQAPDSTGEYAVGWNEIEGEWYYFNQTGILLQNQWKKWNNHWFYLTDSGASAKNWKKIAGIWYYFNKENQMEIGWIQDKEQWYYLDVDGSMKTGWLQYMGQWYYFAPSGEMKMGWVKDKETWYYMDSTGVMKTGEIEVAGQHYYLEDSGAMKQGWHKKANDWYFYKTDGSRAVGWIKDKDKWYFLKENGQLLVNGKTPEGYTVDSSGAWLVDVSIEKSATIKTTSHSEIKESKEVVKKDLENKETSQHESVTNFSTSQDLTSSTSQSSETSVNKSESEQ

SEQ ID NO: 173 - protein, 642 aa, Streptococcus pneumoniae
MDNREALKTFMTGENFYLQHYLGAHREELNGEYGYTFRVWAPNAQAVHLVGDFTNWIENQIPMVRNDFGVWEVFTNMAQEGHIYKYHVTRQNGHQLMKIDPFAVRYEARPGTGAIVTELPDKKWRDGLWLARRKRWGFAERPVNIYEVHAGSWKRNPDGSPYSFAQLKDELIPYLVEMNYTHIEFMPLMSHPLGLSWGYQLMGYFALEHAYGRPEEFQDFVEECHTHNIGVIVDWVPGHFTINDDALAYYDGTPTFEYQDHNKAHNHGWGALNFDLGKNEVQSFLISCIKHWIDVYHLDGIRVDAVSNMLYLDYDDAPWTPNKDGGNLNYEGYYFLQRLNEVIKLEYPDVMMIAEESSSATNITGMKEIGGLGFDYKWNMGWMNDILRFYEEDPIYRKYDFNLVTFSFMYVFKENYLLPFSHDEVVHGKKSMMHKMWGDRYNQFAGLRNLYTYQICHPGKKLLFMGSEYGQFLEWKSEEQLEWSNLEDPMNAKMKYFTSQLNQFYKDHRCLWEIDTSYDGIEIIDADNRDQSVLSFIRKGKKGEMLVCIFNMVPVERKDFTIGLPVAGIYEEVWNTELEEWGGVWKEHNQTVQTQEGLWKDYEQTLTFTLPAMGASVWKIKRRLKSTKTVTNKNQKGVENEK

SEQ ID NO: 174 - protein, 380 aa, Streptococcus pneumoniae
MKNEMLALILAGGQGTRLAKLTQSIAKPAVQFGGRYRIIDFALSNCANSGIHNVGVVTQYQPLALNNHIGNGSSWGLDGIDSGVSILQPYSASEGNRWFEGTSHAIYQNIDYIDSVNPEYVLILSGDHIYKMDYDDMLQSHKDNNASLTVAVLDVPLKEASRFGIMNTDANNRIVEFEEKPAQPKSTKASMGIYIFDWQRLRNMLVAAEKSKVGMSDFGKNVIPNYLELGESVYAYEFSGYWKDVGTIESLWEANMEYISPENALDSRNRQWKIYSRNLISPPNFLGANAHVEDSLVVDGCFVDGTVKHSILSTGAQVREGAEVLDSVIMSGAIIGQGAKIKRAIIGEGAIISDGVEIDGTDEVQVVGYNEVVGVATDED

SEQ ID NO: 175 - protein, 149 aa, Streptococcus pneumoniae
MELVEFKNGHVNTVHEHIAITKVKEFLNNHDIPKDKGGIHKISTDFFYNIIDMETTTEENRPWESHKEYYDVHYLLNGEEIILYNFLSQMELSEYKVDDDWQQMNGTALFSIKLKKDMLLLLEPNDAHKTGLLVEEPINIKKVVFKVKI

SEQ ID NO: 176 - protein, 194 aa, Streptococcus pneumoniae
MKDVVYSITPENKLSIDFSFKSPFRVLLTGTSGSGKTTILNLINGSLKPQKGYVNLLSHGKKSSDSIPTVDQTPYIFDTTIRENVTLFQNEYFSDDQIIEVLKKVNLYEELEKIDILNYQCGENGSNLSGGQKQKIALARALIRNNKVYLFDEISANLDNDNSNSIHDILFNLGISFIEVSHHYDLNDKRYTDI

SEQ ID NO: 177 - protein, 195 aa, Streptococcus pneumoniae
MKRIIPVYIFQQVNVLLVSLYLLKFLCIGELTILQILYGSSLISFLWMYGQRKQAHKVNMKSRMKWLGVEFVSLLIISLCFSLIHAQGSTNQANLIGLQHQIPWFSFLLFLINASMVEEFLYREILWNLVRNLDIRVALTSVLFALAHHTGTILAWCLYVSLGMFLGMVRYKSDLWGSMGLHLVWNLLVYSLLLF

SEQ ID NO: 178 - protein, 211 aa, Streptococcus pneumoniae
VAVQLLENWLLKEQEKIQTKYRHLNHISVVEPNILFIGDSIVEYYPLQELFGTSKTIVNRGIRGYQTGLLLENLDAHLYGGAVDKIFLLIGTNDIGKDVPVNEALNNLEAIIQSVARDYPLTEIKLLSILPVNEGEKYQQAVYIRSNEKIQNWNQAYQELASAYMQVEFVPVFNCLTDQAGQLKKEYTTDGLHLSIAGYQALSKSLKDYLY

SEQ ID NO: 179 - protein, 531 aa, Streptococcus pneumoniae
MKRIVFELIFIATTWYIFLPPLNLTSWEFLFFLCGHLLVVAILFGFGKGINLVKTVHVRHGKAEAALNLEGFKINRLGKILLASIGGILLLAALVSLVTSSMFQAKNYANVVTVTEKDFTEFPRSDTSKVPILDRSTAEKIGDRYLGSLTDKVSQYVAADTYTQLTIDGKPYRVTPLEYADPIKWFNNQAKGIGEYIKVDMVTGNADLVDLKTPIKYSDSEYFNRDVKRHLRLKYPTKIFKTPSFEVDDEGNPFYVATVYQKQFGLAVPRPASVIILDATNGETKEYSLSDVPEWVDRIYPAEETIEQINYNGKYKDGFLNAMISKKNVTQTTKGYNYLSIGNDIYLYTGVTSANADESNLGFILENMRTGEITKYSLASATEESARESAEGAVQEKSYKATFPILINLNDKPLYIMGLKDNAGLVKEYALVDAVEYQNVIVATTVEEMLSKYANKNDLEIDNATTESINGVVADLKSAVIKGDTVYFFKVDGKIYKVKASVSDDLPYLENGKTFEGQVGKDNYLKTFKLR

SEQ ID NO: 180 - protein, 490 aa, Streptococcus pneumoniae
LKTKIGLASICLLGLATSHVAANETEVAKTSQDTTTASSSSEQNQSSNKTQTSAEVQTNAAAHWDGDYYVKDDGSKAQSEWIFDNYYKAWFYINSDGRYSQNEWHGNYYLKSGGYMAQNEWIYDSNYKSWFYLKSDGAYAHQEWQLIGNKWYYFKKWGYMAKSQWQGSYFLNGQGAMMQNEWLYDPAYSAYFYLKSDGTYANQEWQKVGGKWYYFKKWGYMARNEWQGNYYLTGSGAMATDEVIMDGTRYIFAASGELKEKKDLNVGWVHRDGKRYFFNNREEQVGTEHAKKVIDISEHNGRINDWKKVIDENEVDGVIVRLGYSGKEDKELAHNIKELNRLGIPYGVYLYTYAENETDAESDAKQTIELIKKYNMNLSYPIYYDVENWEYVNKSKRAPSDTGTWVKIINKYMDTMKQAGYQNVYVYSYRSLLQTRLKHPDILKHVNWVAAYTNALEWENPHYSGKKGWQYTSSEYMKGIQGRVDVSVWY

SEQ ID NO: 181 - protein, 412 aa, Streptococcus pneumoniae
MHIFLKNRAFRQLTVNEWISSFGDTIFYLAFINYVSSYAFAPLAIFLISLSETIPQVLQLFTGVIADFQKNRISKYISILFIKVLLYSGVTLLLTSTDFSLFSVFFICSMNLISDTIGFLAGYMLTPIYIRLINDDMTEAMGFRQSTSSIVRLIGNLSGGVFLGLFSISTLAFVNVLTFLFAFLGSLLIRNRLKKEEEKIEVPPYVGMSSFFQHLKESMKLLMTMEDVMVLLWILSISQAVLMMVEPVSAILLIHHPFMGLSTGQSLAILIMISLLHVILGGLLSGFLSKKISIRLNIYWSLLMESLIVIDFLRGSFLLILLGSAGDAFSAGVLSPRLQAMIFGIIPEELMGSVQSSINVINLLIPAVLSLALVFLATSAGLEVVAFALIILLLIAAYLVHQMKNLPNQEEV

SEQ ID NO: 182 - protein, 246 aa, Streptococcus pneumoniae
MATYETFAAVYDAVMDDSLYDKWTNFSLRHLPKTKERKKLLELACGTGIQSVRFSQAGFDVTGLDLSADMLKIAEKRATSAKQKIAFIEGNMLNLSKAGKYDFVTCYSDSICYMQDEVEVGDVFKDVYNALNEEGVFIFDVHSTYQTDEVFPGYSYHENAEDFAMLWDTYEDEAPHSIVHELTFFIKEADGSFSRHDEVHEERTYEILTYDILLEQAGFKSFKLYADFEDKEPTETSTRWFFVAQK

SEQ ID NO: 183 - protein, 333 aa, Streptococcus pneumoniae
MKNINGKKVTIYDIARLSGFSPKTVSRVINGGVNVKEETYQAIQKVIEELSYIPNAYAKNLTKKEAINILISVKKIDSFPLIWFHTLLDKVLRTCKEFGVNAIVEYFGEEDTISNSIISSTGSLVDGVIVFYESVDDIRIQYLKKNHMPFLVFGESQTSGVVYVSNNNFQATYDMMKAVTEEKFKNMWLLMGGESHVNKDRERGVRSFLNDKNYFMDLKVIYGLSTIDSVYSYAMQHLTTQNYPDIIFVSGDEKVQGLIRACYEKGILIPDDISIIGFDNIPISQYYTPALSTIAPNYVKLAKEMIEGVLAIIKGESVTSVEVSPKFVRRQSF

SEQ ID NO: 184 - protein, 242 aa, Streptococcus pneumoniae
MIEYKNVALRYTEKDVLRDVNLQIEDGEFMVLVGPSGSGKTTMLKMINRLLEPTDGNIYMDGKRIKDYDERELRLSTGYVLQAIALFPNLTVAENIALIPEMKGWSKEEITKKTEELLAKVGLPVAEYGHRLPSELSGGEQQRVGIVRAMIGQPKIFLMDEPFSALDAISRKQLQVLTKELHKEFGMTTIFVTHDTDEALKLADRIAVLQDGEIRQVANPETILKAPATDFVADLFGGSVHD

SEQ ID NO: 185 - protein, 319 aa, Streptococcus pneumoniae
MKLSHYLIGLLLLLVFLSISIGTSDFSWGKLFDFDQQTWLLFQESRLPRTISILLTASSMSMAGLLMQTITQNQFAAPSTVGTTEAAKLGMVLSLFVFPSASLTQKMLFAFVSSIVFTLFFLAFMTIFTVKERWMLPLIGIIYSGIIGSVTEVIAYRFNLVQSMTAWTQGSFSMIQTHQYEWLFLGLIILITVWKLSQTFTIMNLGKETSESLGISYSLLEKLALFLVALTTSVTMITVGGLPFLGVIVPNLVRKRYGDNLSQTKLMVALVGANLVLACDILSRVLIRPYELSVSLLLGIIGSLVFILLLWRGGRKDAD

SEQ ID NO: 186 - protein, 110 aa, Streptococcus pneumoniae
MYICIDNSMTKNKELVKNQTFKPALLTRRLVKNFMIEEPDLARNPFTRPTLIDLDKVFMLDNTVIPTSYLARRRRNVSEELYEEILDYLVQPRLISLNKSEFMQLNPGTY

SEQ ID NO: 187 - protein, 345 aa, Streptococcus pneumoniae
MKKKIRWPLYVIAALIVTFLAFVVPLPYYIEVPGGSEDIRQVLKVNDTEDKEAGAYQFVTVGVQHATLAHMIYAWLTPFTDIRSAQETTGGSSDVEFMRINQFYMQTSQNMAKYQGLKTAGKDIELKYFGVYVLNVTDNSTFKGILNISDTVTAVNDQTFDSSKDLIDYVSSQKLGDSVKVTYEEDGQTKSAEGKIITLENGKNGIGIGLIDRTEVISNVPISFSTAGIGGPSAGLMFSLAIYTQIAHPDLRNGRIVAGTGTIDRDGNVGDIGGIDKKVVASARAGAAIFFAPDNPVSEEEQKAHPDAKNNYQTALEAAKTIKTDMKIVPVKTLQDAIDYLKNNP

SEQ ID NO: 188 - protein, 227 aa, Streptococcus pneumoniae
MNHTIIHDRAGLNQFYAKVYAFVGLGIGLSALVSGLMLTVFQSQLVYFLMQGRLWLTIATFAELALVFVASSMASRNSPSALPVFLLYSVLNGFTLSFVVAFYTPGTVLSAFVSSALLFFVMAAVGIFTKKDLSGIGRAMMAALIGLLIAMVVNIFLASGFFDYMISVAMVLVFSGLIAWDNQKIRLAYEQSQGRVATGWVVSMALSIYLDFINLFLSILRIFGRND

SEQ ID NO: 189 - protein, 430 aa, Streptococcus pneumoniae
MEKQQPSKAALLSIIPGLGQIYNKQKAKGFIFLGVTIVFVLYFLALATPELSNLITLGDKPGRDNSLFMLIRGAFHLIFVIVYVLFYFSNIKDAHTIAKRINNGIPVPRTLKDMIKGIYENGFPYLLIIPSYVAMTFAIIFPVIVTLMIAFTNYDFQHLPPNKLLDWVGLTNFTNIWSLSTFRSAFGSVLSWTIIWALAASTLQIVIGIFTAIIANQPFIKGKRIFGVIFLLPWAVPAFITILTFSNMFNDSVGAINTQVLPILAKFLPFLDGALIPWKTDPTWTKIALIMMQGWLGFPYIYVLTLGILQSIPNDLYEAAYIDGANAWQKFRNITFPMILAVAAPTLISQYTFNFNNFSIMYLFNGGGPGSVGGGAGSTDILISWIYRLTTGTSPQYSMAAAVTLIISIIVISISMIAFKKLHAFDMEDV

SEQ ID NO: 190 - protein, 287 aa, Streptococcus pneumoniae
MRYDFGKVYKEIRESKGLTQEEVCGGVLSRTSLSKIESGKTTPKYENMEFLLRQINMSFEEFEYICQLYQPSQRTEIMQTYLNMRSIIGTSDLVNLFQKCQDYLKTHHDLPIEEIRDMLEVVIYIRQHGAGELSDHAEQVVKKLWRKIEKQDTWYESDLKILNTILFSFPIEYLHLITGKILQRLEVYKNYQHLYDLRIAILLNLSTLYLYNQDKNMCKQICYTLLEDAKNKKSYDRLAICYVRIGICTDDSKLIQKGFSLLELTEETSMLSHLKKEVEIYYQAKER

SEQ ID NO: 191 - protein, 117 aa, Streptococcus pneumoniae
MELVLPNNYVVIDEEEMMYLDGGAYLSKSACQGICVALAMSPGTFIALTGAAVLTKKLINYIKVGGLGGWLIGAAAGVLATAAGKIAYCIGYGALNRGCDISGNPYPWDGFISATVR

SEQ ID NO: 192 - protein, 230 aa, Streptococcus pneumoniae
MESLIQTYLPNVYKMGWAGQAGWGTAIYLTLYMTVLSFIIGGFLGLVAGLFLVLTAPGGVLENKVVFWILDKITSIFRAVPFIILLAILSPLSHLIVKTSIGPNAALVPLSFAVFAFFARQVQVVLAELDGGVIEAAQASGATFWDIVGVYLSEGLPDLIRVTTVTLISLVGETAMAGAVGAGGIGNVAIAYGFNRYNHDVTILATIIIILIIFAIQFLGDFLTKKLSHK

SEQ ID NO: 193 - protein, 189 aa, Streptococcus pneumoniae
MKKSILTTLLFAVLYFLCMGIGVLLGNLFDQTGNMFYAPAFTALVGGSVYMILVAKVPRFGAITTIGLVIAFFFLGTKHGAGSFLPGIICGLLADEVAHLGKYKDKTKNFLSFIIFAFSTTGPILLMWIAPKAYMATLLARGKSQEYIDRIMVAPNPGTVLLFIASIVIGALVGALIGQALSKKFAQKI

SEQ ID NO: 194 - protein, 392 aa, Streptococcus pneumoniae
MKNLIKLLIIRLIVNLADSVFYIVALWHVSNNYSSSMFLGIFIAVNYLPDLLLIFFGPVIDRVNPQKILIISILVQLAVAVIFLLLLNQISFWVIMSLVFISVMASSISYVIEDVLIPQVVEYDKIVFANSLFSISYKVLDSIFNSFASFLQVAVGFILLVKIDIGIFLLALFILLLLKFRTSNANIENFSFKYYKREVLQGTKFILNNKLLFKTSISLTLINFFYSFQTVVVPIFSIRYFDGPIFYGIFLTIAGLGGILGNMLAPIVIKYLKSNQIVGVFLFLNGSSWLVAIVIKDYTLSLILFFVCFMSKGVFNIIFNSLYQQIPPHQLLGRVNTTIDSIISFGMPIGSLVAGTLIDLNIELVLIAISIPYFLFSYIFYTDNGLKEFSIY

SEQ ID NO: 195 - protein, 512 aa, Streptococcus pneumoniae
MSVYGRVEEVHKENREPLEYQIEQESHHRESSRLPLVKILLWSTLVTGITLGVPLLLDLMSAQEVQDFYAGWALHQTGKIYSDYYGSQGLLYYLLTYVSQGGFFFAIFEWLALVAGGFFLFRSADTLTEQGDQAGHLVTIFYMLVTGLAFGGGYATLLALPFLFAAFSLVAAYLSNPSHDKGFVRIGLALAGGFFFAPLSSLLFIAVVSLGLLVFNLGHRRFAHGFYQFLAVALGFSLVFYPTAYYSAATGSFGDAISGIRYPIDSIRFDFTSKILENMFFYGLLSLGLGFVVCIFLGLFQSKPFKLYVISVPASLVVILGLILLFFSQEPLHASYLMVVFPVFLLLLVTNIKSQQRGRSARRSLRETPVSLWSRFFKGNLYLLVFGFVYLLSVPFLMKFVLYPVPYQERNRLADLVKEETNTEDAIYAWDDTATLYRKSERLSPSAILSPLHYTATEENRNKLLNDLKEKQPKVIVVNDKVVVWSEVETLLKENYQQVKTDYSEFKVYKIK

SEQ ID NO: 196 - protein, 449 aa, Streptococcus pneumoniae
MSKYNVLAKDIVTYVGGAENVKSLRHCATRLRFELKDESQADKEALMNLDILQVVQASGQYQVVVGPHVASVYEAVMAELPVIGGASSINEDTTAEEKKWYDVIFDTISGSFTPLIPVFCGSGLVKALGSVLLMTGLLTAESSTYAVLNAAGNAVFYFLPILLAISVANKLGTNPYIAGAIGAALLEPSFTALAGNESNTFLGLPIIINNYASSVFPAFMAVVGLYFLDKFLKKVVPATIHLVVLPFIEIVAMVPLTIFIFGPFGTYLSTGLSMFVTNLLDLNAMLAGAVLSMIWIYVVMLGLHWALIPIMINNIATNGSDPLMGLMIGTVWVAGGVSLGVALKAKDKKLKGIAWTGMIPCFLSGVSEPIMYGILFRYKKSLMWATVMNAVTGAMAGLIGISGTQIAGGVFTIPTFSPILGYLALIAVSVFGTAALIVIFGFGEEGSKA

SEQ ID NO: 197 - protein, 58 aa, Streptococcus pneumoniae
MSLDIDKEKMTIMGIAFENRSVFKSVWYALSTNMIEGWRPTVSDVEKLRDEALSLGMT

SEQ ID NO: 198 - protein, 396 aa, Streptococcus pneumoniae
MIKKVTIEKIKSPERFLEVPLLTKEEVGQAIDKVIRQLELNLDYFKEDFPTPATFDNVYPIMDNTEWTNGFWTGELWLAYEYSQQDAFKNIAHKNVLSFLDRVNKRVELDHHDLGFLYTPSCMAEYKINGDGEAREATLKAADKLIERYQEKGGFIQAWGDLGKKEHYRLIIDCLLNIQLLFFAYQETGDQKYYDIAESHFYASANNVIRDDASSFHTFYFDPETGQPFKGVTRQGYSDDSCWARGQSWGVYGIPLTYRHLKDESCFDLFKGVTNYFLNRLPKDHVSYWDLIFNDGSAQSRDSSATAIAVCGIHEMLKHLPEVDADKDIYKHAMHAMLRSLIEHYANDQFTPGGTSLLHGVYSWHSGKGVDEGNIWGDYYYLEALIRFYKDWNLYW

SEQ ID NO: 199 - protein, 182 aa, Streptococcus pneumoniae
MKSLARLLIIHVFISIFLFFALISGAVSHTVLLLLLLFLPALNKGLEKIQSKRIPVLNAALFFLLISFPQLLTNPVQWKFSIFLVVTIISSLAYFYNFYQVVKEVDQKQLIMRIKEFEDDDLVSPRTNQLMFIGLTGFMSIICLYRGITAGESYQQLIAYIGAILCLIIMLLLIWGLKYYKK

SEQ ID NO: 200 - protein, 71 aa, Streptococcus pneumoniae
MRIKEFEDDDLVSPRTNQLMFIGLTGFMSIICLYRGITAGESYQQLIAYIGAILCLIIMLLLIWGLKYYKK

SEQ ID NO: 201 - protein, 229 aa, Streptococcus pneumoniae
MKKYQLLFKISAVFSYLFFVFGLSQLTLIVQNYWQFSSQIGNLFWIQNILSLLFIGVMIVVLVKTGHGYLFRIPRKKWLWYSILTVLVVVFQISFNVQTAKHVQSTAEGWAVLIGYSGTNFAELGIYIALFFLVPLMEELIYRGLLQHAFFKHSRFGLDLLLPSILFALPHFLSLPSLLDIFVFATVGIIFAGLTRYTKSIYPSYAVHVINNIVATFPFLLTFLHRVLG

SEQ ID NO: 202 - protein, 425 aa, Streptococcus pneumoniae
MNPIQRSWAYVSRKRLRSFILFLILLVLLAGISACLTLMKSNKTVESNLYKSLNTSFSIKKIENGQTFKLSDLASVSKIKGLENVSPELETVAKLKDKEAVTGEQSVERDDLSAADNNLVSLTALEDSSKDVTFTSSAFNLKEGRHLQKGDSKKILIHEELAKKNGLSLHDKIGLDAGQSESGKGQTVEFEIIGIFSGKKQEKFTGLSSDFSENQVFTDYESSQTLLGNSEAQVSAARFYVENPKEMDGLMKQVENLALENQGYQVEKENKAFEQIKDSVATFQTFLTIFLYGMLIAGAGALILVLSLWLRERVYEVGILLALGKGKSSIFLQFCLEVVLVSLGALLPAFVAGNGITTYLLQTLLASGDQASLQDTLAKASSLSTSILSFAESYVFLVLLSCLSVALCFLFLFRKSPKEILSSIS

SEQ ID NO: 203 - protein, 213 aa, Streptococcus pneumoniae
MIELKNISKKFGSRQLFSDTNLHFEGGKIYALIGTSGCGKTTLLNMIGRLEPYDKGQIIYDGTSLKDIKPSVFFRDYLGYLFQDFGLIESQTVKENLNLGLVGKKLKEKEKISLMKQALNRVNLSYLDLKQPIFELSGGEAQRVALAKIILKDPPLILADEPTASLDPKNSEELLSILESLKNPNRTIIIATHNPLIWEQVDQVIRVTDLSHR

SEQ ID NO: 204 - protein, 222 aa, Streptococcus pneumoniae
METQDYAFQPGLTVGELLKSSQKDWQAAINHRFVKELFAGTIENKVLKDYLIQDYHFFDAFLSMLGACVAHADKLESKLRFAKQLGFLEADEDGYFQKAFKELKVAENDYLEVTLHPVTKAFQDLMYSAVASSDYAHLLVMLVIAEGLYLDWGSKDLALPEVYIHSEWINLHRGPFFAEWVQFLVDELNRVGKNREDLTELQQRWNQAVALELAFFDIGYNV

SEQ ID NO: 205 - protein, 134 aa, Streptococcus pneumoniae
MKILKRYILELCFILSFALPFIKGANADNGRCFVETYYGFTFLMEHAIVTAVFIYSFLIAFLLKKRWAKWIAAGSYCFLVLWIATEGYFFRMSLEDLIRLWTSLEILTQTYQLGFYLNILLGILLIIKYFKVKQ

SEQ ID NO: 206 - DNA, 22 bp, Artificial Sequence
  synthetic sequence
ggagctactagatcatgaactc

SEQ ID NO: 207 - DNA, 54 bp, Artificial Sequence
  synthetic sequence
gagtcgcttttgtaaatttggaagttttaattttagaagatgttattgaacatc

SEQ ID NO: 208 - DNA, 51 bp, Artificial Sequence
  synthetic sequence
gtttgcttctaagtcttatttcctctgctactcctttatcttcttctaaag

SEQ ID NO: 209 - DNA, 51 bp, Artificial Sequence; identical to SEQ ID NO: 208
  synthetic sequence

SEQ ID NO: 210 - DNA, 25 bp, Artificial Sequence
  synthetic sequence
gcaaggtatcaattagaaaataggc

SEQ ID NO: 211 - DNA, 50 bp, Artificial Sequence
  synthetic sequence
gtttgcttctaagtcttatttccaaaaactccttaaacatatttcaagtc

SEQ ID NO: 212 - DNA, 45 bp, Artificial Sequence
  synthetic sequence
gagtcgcttttgtaaatttggttaggaaatgcatgcaaaaatgcg

SEQ ID NO: 213 - DNA, 19 bp, Artificial Sequence
  synthetic sequence
gctccaggaacagtttcac

SEQ ID NO: 214 - DNA, 27 bp, Artificial Sequence
  synthetic sequence
gaccaatcagagcaaaaataagaagag

SEQ ID NO: 215 - DNA, 52 bp, Artificial Sequence
  synthetic sequence
gagtcgcttttgtaaatttggatgaagtggaccaagattattaaaaaaatag

SEQ ID NO: 216 - DNA, 58 bp, Artificial Sequence
  synthetic sequence
gtttgcttctaagtcttatttccattcataaattcctccgtcactttttattttaaag

SEQ ID NO: 217 - DNA, 24 bp, Artificial Sequence
  synthetic sequence
ggtgattttgtcaaggaaggtacg

SEQ ID NO: 218 - DNA, 23 bp, Artificial Sequence
  synthetic sequence
cggattattcctactttaaaagc

SEQ ID NO: 219 - DNA, 24 bp, Artificial Sequence
  synthetic sequence
ccacaattcaacattatttctatc

SEQ ID NO: 220 - DNA, 18 bp, Artificial Sequence
  synthetic sequence
gcgagcgagtgaagctgg

SEQ ID NO: 221 - DNA, 57 bp, Artificial Sequence
  synthetic sequence
gtttgcttctaagtcttatttccttactattgagaggaagttaaaaaaatttgaacc

SEQ ID NO: 222 - DNA, 50 bp, Artificial Sequence
  synthetic sequence
gagtcgcttttgtaaatttggttcctctcgccgaaaatcaaatatgaaac

SEQ ID NO: 223 - DNA, 28 bp, Artificial Sequence
  synthetic sequence
ccatagtcactatatacgagaatttcgc

SEQ ID NO: 224 - DNA, 20 bp, Artificial Sequence
  synthetic sequence
cggttagtgtgggagcaacg

SEQ ID NO: 225 - DNA, 53 bp, Artificial Sequence
  synthetic sequence
gtttgcttctaagtcttatttccttagaatttcctgatgcttactcattgaac

SEQ ID NO: 226 - DNA, 55 bp, Artificial Sequence
  synthetic sequence
gagtcgcttttgtaaatttggaaactaggagaaaagatgataacattaaaatcag

SEQ ID NO: 227 - DNA, 26 bp, Artificial Sequence
  synthetic sequence
gaatctctacaggaacaatagactgc

SEQ ID NO: 228 - DNA, 20 bp, Artificial Sequence
  synthetic sequence
gcagaatctcccaaggaaag

SEQ ID NO: 229 - DNA, 44 bp, Artificial Sequence
  synthetic sequence
gaaaacaataaacccttgcatatggtgataggataggaagcatc

SEQ ID NO: 230 - DNA, 20 bp, Artificial Sequence
  synthetic sequence
cacctttttcatcacctgtc

SEQ ID NO: 231 - DNA, 21 bp, Artificial Sequence
  synthetic sequence
tttcccttgaactagtcgaag

SEQ ID NO: 232 - DNA, 48 bp, Artificial Sequence
  synthetic sequence
gtattcacgaacgaaaatcgatttatttcgcatttttgcatgcatttc

SEQ ID NO: 233 - DNA, 53 bp, Artificial Sequence
  synthetic sequence
gacaggtgatgaaaaaggtgaaaactagatccttttttgaaaaaattatatta

SEQ ID NO: 234 - DNA, 50 bp, Artificial Sequence
  synthetic sequence
gtattcacgaacgaaaatcgattcattcaaatttcctcttaaatctaatg

SEQ ID NO: 235 - DNA, 46 bp, Artificial Sequence
  synthetic sequence
gacaggtgatgaaaaaggtggaaggaaaaagacttgcaaaatattc

SEQ ID NO: 236 - DNA, 44 bp, Artificial Sequence
  synthetic sequence
gtattcacgaacgaaaatcgatttatttaattgcgcgtgattgc

SEQ ID NO: 237 - DNA, 45 bp, Artificial Sequence
  synthetic sequence
gacaggtgatgaaaaaggtggcataaatatgatacagtggaatag

SEQ ID NO: 238 - DNA, 40 bp, Artificial Sequence
  synthetic sequence
  misc_feature (1)..(5): n is a, c, g, or t
nnnnngaattcggaggaatttatgaatgtaaatcagattg

SEQ ID NO: 239 - DNA, 38 bp, Artificial Sequence
  synthetic sequence
  misc_feature (1)..(5): n is a, c, g, or t
nnnnnctgcagtcatacttcttcaaaccacaattcaac

SEQ ID NO: 240 - DNA, 23 bp, Artificial Sequence
  synthetic sequence
ggaaataagacttagaagcaaac

SEQ ID NO: 241 - DNA, 21 bp, Artificial Sequence
  synthetic sequence
ccaaatttacaaaagcgactc

SEQ ID NO: 242 - DNA, 22 bp, Artificial Sequence
  synthetic sequence
atcgattttcgttcgtgaatac

SEQ ID NO: 243 - DNA, 24 bp, Artificial Sequence
  synthetic sequence
catatgcaagggtttattgttttc
